(19) United States
(12) Patent Application Publication
(10) Pub. No.: US 2007/0099858 A1
(43) Pub. Date: May 3, 2007

(54) RNA interference mediated of inhibition of influenza virus gene expression using short interfering nucleic acid (siNA)

(75) Inventors: Vasant Jadhav, Longmont, CO (US); Howard Robin, Boulder, CO (US); James McSwiggen, Boulder, CO (US)

Correspondence Address: MCDONNELL BOEHNEN HULBERT & BERGHOFF LLP, 300 S. WACKER DRIVE, 32ND FLOOR, CHICAGO, IL, 60606, US

(73) Assignee: Sirna Therapeutics, Inc., Boulder, CO (US)

(21) Appl. No.: 11/242,567

(22) Filed: Oct. 3, 2005

(51) Int. Cl. A61K 48/00; C07H 21/02

(52) U.S. Cl. 514/44; 536/23.1; 536/23.72

(57) ABSTRACT

This invention relates to compounds, compositions, and methods useful for modulating influenza virus gene expression using short interfering nucleic acid (siNA) molecules. In particular, the instant invention features small nucleic acid molecules, such as short interfering nucleic acid (siNA), short interfering RNA (siRNA), double-stranded RNA (dsRNA), micro-RNA (miRNA), and short hairpin RNA (shRNA) molecules and methods used to modulate the expression of influenza virus genes, such as viral and host genes associated with the maintenance or development of influenza virus infection and related diseases and conditions in a subject or organism.

[0001] This application is a continuation-in-part of U.S. Patent Application No. TBD, filed Sep. 23, 2005, which is a continuation-in-part of U.S. patent application Ser. No. 11/205,646, filed Aug. 17, 2005, which is a continuation-in-part of U.S. patent application Ser. No. 11/098,303, filed Apr. 4, 2005, which is a continuation-in-part of U.S. patent application Ser. No. 10/923,536, filed Aug. 20, 2004, which is a continuation-in-part of International Patent Application No. PCT/US04/16390, filed May 24, 2004, which is a continuation-in-part of U.S. patent application Ser. No. 10/826,966, filed Apr. 16, 2004, which is continuation-in-part of U.S. patent application Ser. No. 10/757,803, filed Jan. 14, 2004, which is a continuation-in-part of U.S. patent application Ser. No. 10/720,448, filed Nov. 24, 2003, which is a continuation-in-part of U.S. patent application Ser. No. 10/693,059, filed Oct. 23, 2003, which is a continuation-in-part of U.S. patent application Ser. No. 10/444,853, filed May 23, 2003, which is a continuation-in-part of International Patent Application No. PCT/US03/05346, filed Feb. 20, 2003, and a continuation-in-part of International Patent Application No. PCT/US03/05028, filed Feb. 20, 2003, both of which claim the benefit of U.S. Provisional Application No. 60/358,580 filed Feb. 20, 2002, U.S. Provisional Application No. 60/363,124 filed Mar. 11, 2002, U.S. Provisional Application No. 60/386,782 filed Jun. 6, 2002, U.S. Provisional Application No. 60/406,784 filed Aug. 29, 2002, U.S. Provisional Application No. 60/408,378 filed Sep. 5, 2002, U.S. Provisional Application No. 60/409,293 filed Sep. 9, 2002, and U.S. Provisional Application No. 60/440,129 filed Jan. 15, 2003. This application is also a continuation-in-part of International Patent Application No. PCT/US04/13456, filed Apr. 30, 2004, which is a continuation-in-part of U.S. patent application Ser. No. 10/780,447, filed Feb. 13, 2004, which is a continuation-in-part of U.S. patent application Ser. No. 10/427,160, filed Apr. 30, 2003, which is a continuation-in-part of International Patent Application No. PCT/US02/15876 filed May 17, 2002, which claims the benefit of U.S. Provisional Application No. 60/292,217, filed May 18, 2001, U.S. Provisional Application No. 60/362,016, filed Mar. 6, 2002, U.S. Provisional Application No. 60/306,883, filed Jul. 20, 2001, and U.S. Provisional Application No. 60/311,865, filed Aug. 13, 2001. This application is also a continuation-in-part of U.S. patent application Ser. No. 10/727,780 filed Dec. 3, 2003. This application is also a continuation-in-part of International Patent Application No. PCT/US05/04270 filed Feb. 9, 2005, which claims the benefit of U.S. Provisional Application No. 60/543,480, filed Feb. 10, 2004. The instant application claims the benefit of all the listed applications, which are hereby incorporated by reference herein in their entireties, including the drawings.

### FIELD OF THE INVENTION

[0002] The present invention relates to compounds, compositions, and methods for the study, diagnosis, and treatment of traits, diseases and conditions that respond to the modulation of influenza virus gene expression and/or activity. The present invention is also directed to compounds, compositions, and methods relating to traits, diseases and conditions that respond to the modulation of expression and/or activity of genes involved in influenza virus gene expression pathways or other cellular processes that mediate the maintenance or development of such traits, diseases and conditions. Specifically, the invention relates to small nucleic acid molecules, such as short interfering nucleic acid (siNA), short interfering RNA (siRNA), double-stranded RNA (dsRNA), micro-RNA (miRNA), and short hairpin RNA (shRNA) molecules capable of mediating or that mediate RNA interference (RNAi) against influenza virus gene expression. Such small nucleic acid molecules are useful, for example, in providing compositions for treatment of traits, diseases and conditions that can respond to modulation of influenza virus gene expression in a subject or organism, such as to prevent, inhibit, or reduce influenza virus infection or prevent, inhibit, or reduce any disease, condition, trait or indication that can respond to the level of influenza virus gene expression in a cell or tissue.

### BACKGROUND OF THE INVENTION

[0003] The following is a discussion of relevant art pertaining to RNAi. The discussion is provided only for understanding of the invention that follows. The summary is not an admission that any of the work described below is prior art to the claimed invention.

[0004] RNA interference refers to the process of sequence-specific post-transcriptional gene silencing in animals mediated by short interfering RNAs (siRNAs) (Zamore et al., 2000, Cell, 101, 25-33; Fire et al., 1998, Nature, 391, 806; Hamilton et al., 1999, Science, 286, 950-951; Lin et al., 1999, Nature, 402, 128-129; Sharp, 1999, Genes & Dev., 13:139-141; and Strauss, 1999, Science, 286, 886). The corresponding process in plants (Heifetz et al., International PCT Publication No. WO 99/61631) is commonly referred to as post-transcriptional gene silencing or RNA silencing and is also referred to as quelling in fungi. The process of post-transcriptional gene silencing is thought to be an evolutionarily-conserved cellular defense mechanism used to prevent the expression of foreign genes and is commonly shared by diverse flora and phyla (Fire et al., 1999, Trends Genet., 15, 358). Such protection from foreign gene expression may have evolved in response to the production of double-stranded RNAs (dsRNAs) derived from viral infection or from the random integration of transposon elements into a host genome via a cellular response that specifically destroys homologous single-stranded RNA or viral genomic RNA. The presence of dsRNA in cells triggers the RNAi response through a mechanism that has yet to be fully characterized. This mechanism appears to be different from other known mechanisms involving double stranded RNA-specific ribonucleases, such as the interferon response that results from dsRNA-mediated activation of protein kinase PKR and 2′,5′-oligoadenylate synthetase resulting in non-specific cleavage of mRNA by ribonuclease L (see for example U.S. Pat. Nos. 6,107,094; 5,898,031; Clemens et al., 1997, J Interferon & Cytokine Res., 17, 503-524; Adah et al., 2001, Curr. Med. Chem., 8,1189).

[0005] The presence of long dsRNAs in cells stimulates the activity of a ribonuclease III enzyme referred to as dicer (Bass, 2000, Cell, 101, 235; Zamore et al., 2000, Cell, 101, 25-33; Hammond et al., 2000, Nature, 404, 293). Dicer is involved in the processing of the dsRNA into short pieces of dsRNA known as short interfering RNAs (siRNAs) (Zamore et al., 2000, Cell, 101, 25-33; Bass, 2000, Cell, 101, 235; Berstein et al., 2001, Nature, 409, 363). Short interfering RNAs derived from dicer activity are typically about 21 to about 23 nucleotides in length and comprise about 19 base pair duplexes (Zamore et al., 2000, Cell, 101, 25-33; Elbashir et al., 2001, Genes Dev., 15, 188). Dicer has also been implicated in the excision of 21- and 22-nucleotide small temporal RNAs (stRNAs) from precursor RNA of conserved structure that are implicated in translational control (Hutvagner et al., 2001, Science, 293, 834). The RNAi response also features an endonuclease complex, commonly referred to as an RNA-induced silencing complex (RISC), which mediates cleavage of single-stranded RNA having sequence complementary to the antisense strand of the siRNA duplex. Cleavage of the target RNA takes place in the middle of the region complementary to the antisense strand of the siRNA duplex (Elbashir et al., 2001, Genes Dev., 15, 188).

[0006] RNAi has been studied in a variety of systems. Fire et al., 1998, Nature, 391, 806, were the first to observe RNAi in C. elegans. Bahramian and Zarbl, 1999, Molecular and Cellular Biology, 19, 274-283 and Wianny and Goetz, 1999, Nature Cell Biol., 2, 70, describe RNAi mediated by dsRNA in mammalian systems. Hammond et al., 2000, Nature, 404, 293, describe RNAi in Drosophila cells transfected with dsRNA. Elbashir et al., 2001, Nature, 411, 494 and Tuschl et al., International PCT Publication No. WO 01/75164, describe RNAi induced by introduction of duplexes of synthetic 21-nucleotide RNAs in cultured mammalian cells including human embryonic kidney and HeLa cells. Recent work in Drosophila embryonic lysates (Elbashir et al., 2001, EMBO J, 20, 6877 and Tuschl et al., International PCT Publication No. WO 01/75164) has revealed certain requirements for siRNA length, structure, chemical composition, and sequence that are essential to mediate efficient RNAi activity. These studies have shown that 21-nucleotide siRNA duplexes are most active when containing 3′-terminal dinucleotide overhangs. Furthermore, complete substitution of one or both siRNA strands with 2′-deoxy (2′-H) or 2′-O-methyl nucleotides abolishes RNAi activity, whereas substitution of the 3′-terminal siRNA overhang nucleotides with 2′-deoxy nucleotides (2′-H) was shown to be tolerated. Single mismatch sequences in the center of the siRNA duplex were also shown to abolish RNAi activity. In addition, these studies also indicate that the position of the cleavage site in the target RNA is defined by the 5′-end of the siRNA guide sequence rather than the 3′-end of the guide sequence (Elbashir et al., 2001, EMBO J, 20, 6877). Other studies have indicated that a 5′-phosphate on the target-complementary strand of a siRNA duplex is required for siRNA activity and that ATP is utilized to maintain the 5′-phosphate moiety on the siRNA (Nykanen et al., 2001, Cell, 107, 309).

[0007] Studies have shown that replacing the 3′-terminal nucleotide overhanging segments of a 21-mer siRNA duplex having two-nucleotide 3′-overhangs with deoxyribonucleotides does not have an adverse effect on RNAi activity. Replacing up to four nucleotides on each end of the siRNA with deoxyribonucleotides has been reported to be well tolerated, whereas complete substitution with deoxyribonucleotides results in no RNAi activity (Elbashir et al., 2001, EMBO J., 20, 6877 and Tuschl et al., International PCT Publication No. WO 01/75164). In addition, Elbashir et al., supra, also report that substitution of siRNA with 2′-O-methyl nucleotides completely abolishes RNAi activity. Li et al., International PCT Publication No. WO 00/44914, and Beach et al., International PCT Publication No. WO 01/68836 preliminarily suggest that siRNA may include modifications to either the phosphate-sugar backbone or the nucleoside to include at least one of a nitrogen or sulfur heteroatom, however, neither application postulates to what extent such modifications would be tolerated in siRNA molecules, nor provides any further guidance or examples of such modified siRNA. Kreutzer et al., Canadian Patent Application No. 2,359,180, also describe certain chemical modifications for use in dsRNA constructs in order to counteract activation of double-stranded RNA-dependent protein kinase PKR, specifically 2′-amino or 2′-O-methyl nucleotides, and nucleotides containing a 2′-O or 4′-C methylene bridge. However, Kreutzer et al. similarly fails to provide examples or guidance as to what extent these modifications would be tolerated in dsRNA molecules.

[0008] Parrish et al., 2000, Molecular Cell, 6, 1077-1087, tested certain chemical modifications targeting the unc-22 gene in C. elegans using long (>25 nt) siRNA transcripts. The authors describe the introduction of thiophosphate residues into these siRNA transcripts by incorporating thiophosphate nucleotide analogs with T7 and T3 RNA polymerase and observed that RNAs with two phosphorothioate modified bases also had substantial decreases in effectiveness as RNAi. Further, Parrish et al. reported that phosphorothioate modification of more than two residues greatly destabilized the RNAs in vitro such that interference activities could not be assayed. Id. at 1081. The authors also tested certain modifications at the 2′-position of the nucleotide sugar in the long siRNA transcripts and found that substituting deoxynucleotides for ribonucleotides produced a substantial decrease in interference activity, especially in the case of Uridine to Thymidine and/or Cytidine to deoxy-Cytidine substitutions. Id. In addition, the authors tested certain base modifications, including substituting, in sense and antisense strands of the siRNA, 4-thiouracil, 5-bromouracil, 5-iodouracil, and 3-(aminoallyl)uracil for uracil, and inosine for guanosine. Whereas 4-thiouracil and 5-bromouracil substitution appeared to be tolerated, Parrish reported that inosine produced a substantial decrease in interference activity when incorporated in either strand. Parrish also reported that incorporation of 5-iodouracil and 3-(aminoallyl)uracil in the antisense strand resulted in a substantial decrease in RNAi activity as well.

[0009] The use of longer dsRNA has been described. For example, Beach et al., International PCT Publication No. WO 01/68836, describes specific methods for attenuating gene expression using endogenously-derived dsRNA. Tuschl et al., International PCT Publication No. WO 01/75164, describe a Drosophila in vitro RNAi system and the use of specific siRNA molecules for certain functional genomic and certain therapeutic applications; although Tuschl, 2001, Chem. Biochem., 2, 239-245, doubts that RNAi can be used to cure genetic diseases or viral infection due to the danger of activating interferon response. Li et al., International PCT Publication No. WO 00/44914, describe the use of specific long (141 bp-488 bp) enzymatically synthesized or vector expressed dsRNAs for attenuating the expression of certain target genes. Zernicka-Goetz et al., International PCT Publication No. WO 01/36646, describe certain methods for inhibiting the expression of particular genes in mammalian cells using certain long (550 bp-714 bp), enzymatically synthesized or vector expressed dsRNA molecules. Fire et al., International PCT Publication No. WO 99/32619, describe particular methods for introducing certain long dsRNA molecules into cells for use in inhibiting gene expression in nematodes. Plaetinck et al., International PCT Publication No. WO 00/01846, describe certain methods for identifying specific genes responsible for conferring a particular phenotype in a cell using specific long dsRNA molecules. Mello et al., International PCT Publication No. WO 01/29058, describe the identification of specific genes involved in dsRNA-mediated RNAi. Pachuck et al., International PCT Publication No. WO 00/63364, describe certain long (at least 200 nucleotide) dsRNA constructs. Deschamps Depaillette et al., International PCT Publication No. WO 99/07409, describe specific compositions consisting of particular dsRNA molecules combined with certain anti-viral agents. Waterhouse et al., International PCT Publication No. 99/53050 and 1998, PNAS, 95, 13959-13964, describe certain methods for decreasing the phenotypic expression of a nucleic acid in plant cells using certain dsRNAs. Driscoll et al., International PCT Publication No. WO 01/49844, describe specific DNA expression constructs for use in facilitating gene silencing in targeted organisms.

[0010] Others have reported on various RNAi and gene-silencing systems. For example, Parrish et al., 2000, Molecular Cell, 6, 1077-1087, describe specific chemically-modified dsRNA constructs targeting the unc-22 gene of C. elegans. Grossniklaus, International PCT Publication No. WO 01/38551, describes certain methods for regulating polycomb gene expression in plants using certain dsRNAs. Churikov et al., International PCT Publication No. WO 01/42443, describe certain methods for modifying genetic characteristics of an organism using certain dsRNAs. Cogoni et al, International PCT Publication No. WO 01/53475, describe certain methods for isolating a Neurospora silencing gene and uses thereof. Reed et al., International PCT Publication No. WO 01/68836, describe certain methods for gene silencing in plants. Honer et al., International PCT Publication No. WO 01/70944, describe certain methods of drug screening using transgenic nematodes as Parkinson's Disease models using certain dsRNAs. Deak et al., International PCT Publication No. WO 01/72774, describe certain Drosophila-derived gene products that may be related to RNAi in Drosophila. Arndt et al., International PCT Publication No. WO 01/92513 describe certain methods for mediating gene suppression by using factors that enhance RNAi. Tuschl et al., International PCT Publication No. WO 02/44321, describe certain synthetic siRNA constructs. Pachuk et al., International PCT Publication No. WO 00/63364, and Satishchandran et al., International PCT Publication No. WO 01/04313, describe certain methods and compositions for inhibiting the function of certain polynucleotide sequences using certain long (over 250 bp), vector expressed dsRNAs. Echeverri et al., International PCT Publication No. WO 02/38805, describe certain C. elegans genes identified via RNAi. Kreutzer et al., International PCT Publications Nos. WO 02/055692, WO 02/055693, and EP 1144623 B1 describes certain methods for inhibiting gene expression using dsRNA. Graham et al., International PCT Publications Nos. WO 99/49029 and WO 01/70949, and AU 4037501 describe certain vector expressed siRNA molecules. Fire et al., US 6,506,559, describe certain methods for inhibiting gene expression in vitro using certain long dsRNA (299 bp-1033 bp) constructs that mediate RNAi. Martinez et al., 2002, Cell, 110, 563-574, describe certain single stranded siRNA constructs, including certain 5′-phosphorylated single stranded siRNAs that mediate RNA interference in Hela cells. Harborth et al., 2003, Antisense & Nucleic Acid Drug Development, 13, 83-105, describe certain chemically and structurally modified siRNA molecules. Chiu and Rana, 2003, RNA, 9, 1034-1048, describe certain chemically and structurally modified siRNA molecules. Woolf et al., International PCT Publication Nos. WO 03/064626 and WO 03/064625 describe certain chemically modified dsRNA constructs. Hornung et al., 2005, Nature Medicine, 11, 263-270, describe the sequence-specific potent induction of IFN-alpha by short interfering RNA in plasmacytoid dendritic cells through TLR7. Judge et al., 2005, Nature Biotechnology, Published online: 20 Mar. 2005, describe the sequence-dependent stimulation of the mammalian innate immune response by synthetic siRNA. Yuki et al., International PCT Publication Nos. WO 05/049821 and WO 04/048566, describe certain methods for designing short interfering RNA sequences and certain short interfering RNA sequences with optimized activity. Saigo et al., US Patent Application Publication No. US20040539332, describe certain methods of designing oligo- or polynucleotide sequences, including short interfering RNA sequences, for achieving RNA interference. Tei et al., International PCT Publication No. WO 03/044188, describe certain methods for inhibiting expression of a target gene, which comprises transfecting a cell, tissue, or individual organism with a double-stranded polynucleotide comprising DNA and RNA having a substantially identical nucleotide sequence with at least a partial nucleotide sequence of the target gene.

[0011] Chen et al., US Patent Application Publication No. US20050242518, describe certain siRNAs targeting influenza virus RNA.

### SUMMARY OF THE INVENTION

[0012] This invention relates to compounds, compositions, and methods useful for modulating influenza virus gene expression using short interfering nucleic acid (siNA) molecules. This invention also relates to compounds, compositions, and methods useful for modulating the expression and activity of other genes, including cellular genes, involved in pathways of influenza virus gene expression and/or activity by RNA interference (RNAi) using small nucleic acid molecules. In particular, the instant invention features small nucleic acid molecules, such as short interfering nucleic acid (siNA), short interfering RNA (siRNA), double-stranded RNA (dsRNA), micro-RNA (miRNA), and short hairpin RNA (shRNA) molecules and methods used to modulate the expression genes. Such small nucleic acid molecules are useful, for example, in providing compositions to prevent, inhibit, or reduce influenza virus infection and/or other disease states associated with influenza virus infection, such as pneumonia and Reye's Syndrome in a subject or organism.

[0013] In one embodiment, with regard to the embodiments that follow, the term “influenza” herein refers to influenza A [H5N1], otherwise know as bird flu, avian influenza, or pandemic flu.

[0014] A siNA of the invention can be unmodified or chemically-modified. A siNA of the instant invention can be chemically synthesized, expressed from a vector or enzymatically synthesized. The instant invention also features various chemically-modified synthetic short interfering nucleic acid (siNA) molecules capable of modulating influenza gene expression or activity in cells by RNA interference (RNAi). The use of chemically-modified siNA improves various properties of native siNA molecules through increased resistance to nuclease degradation in vivo and/or through improved cellular uptake. Further, contrary to earlier published studies, siNA having multiple chemical modifications retains its RNAi activity. The siNA molecules of the instant invention provide useful reagents and methods for a variety of prophylactic, therapeutic, diagnostic, target validation, genomic discovery, genetic engineering, and pharmacogenomic applications.

[0015] In one embodiment, the invention features one or more siNA molecules and methods that independently or in combination modulate the expression of gene(s) encoding influenza virus and/or cellular proteins associated with the maintenance or development of virus infection and related diseases and conditions, such as genes encoding sequences comprising those sequences referred to by GenBank Accession Nos. shown in Table I, referred to herein generally as influenza. The description below of the various aspects and embodiments of the invention is provided with reference to exemplary influenza virus genes. However, such reference is meant to be exemplary only and the various aspects and embodiments of the invention are also directed to other genes that express alternate influenza genes, such as mutant influenza genes, splice variants of influenza genes, and genes encoding different strains of influenza, as well as as cellular targets for influenza, such as those described herein. The various aspects and embodiments are also directed to other genes involved in influenza virus pathways of gene expression, including genes that encode cellular proteins involved in the maintenance and/or development of influenza infection, or other genes that express other proteins associated with influenza infection, such as cellular proteins that are utilized in the influenza life-cycle. Such additional genes can be analyzed for target sites using the methods described herein for influenza virus. Thus, the inhibition and the effects of such inhibition of the other genes can be performed as described herein. In other words, the term “influenza” as it is defined herein below and recited in the described embodiments, is meant to encompass genes associated with the development and/or maintenance of influenza infection, such as genes which encode influenza polypeptides, including polypeptides of different strains of influenza, mutant influenza genes, and splice variants of influenza genes, as well as cellular genes involved in influenza pathways of gene expression, replication, and/or influenza activity. Also, the term “influenza” as it is defined herein below and recited in the described embodiments, is meant to encompass influenza viral gene products and cellular gene products involved in influenza infection, such as those described herein. Thus, each of the embodiments described herein with reference to the term “influenza” are applicable to all of the virus, cellular and viral protein, peptide, polypeptide, and/or polynucleotide molecules covered by the term “influenza”, as that term is defined herein.

[0016] In one embodiment, the present invention features two or more siNA molecules of the invention having specificity for two or more different influenza and/or host targets. In one embodiment, a plurality (e.g., more than one) of siNA molecules or a pool of siNA molecules is featured wherein the siNA molecules of the pool comprise siNA molecules having complementarity to a plurality (e.g., more than one) influenza and/or host targets. In one embodiment, the pool of siNAs comprises 2, 3, 4, 5, 6, 7, 8, 9, 10 or more distinct siNA sequences targeting 2, 3, 4, 5, 6, 7, 8, 9, 10 or more distinct influenza and/or host targets. In another embodiment, the influenza targets are conserved influenza RNA sequences (plus strand and/or minus strand). By targeting more than one influenza target sequence or by targeting both influenza and host target sequences, pooled siNA therapeutic compositions can improve therapeutic treatment approaches by preventing or minimizing escape mutants or viral resistance from occurring. Therefore, in the following embodiments, one or more siNA molecules can be targeted to influenza and/or host targets as described herein.

[0017] In one embodiment, the invention features siNA molecules having RNAi specificity for the influenza virus minus strand. In another embodiment, the invention features siNA molecules having RNAi specificity for the influenza virus plus strand. As such, in the various embodiments herein, the term influenza is meant to encompass influenza plus strand, minus strand, and/or plus and minus strand target sequences.

[0018] In one embodiment, the invention features one or more siNA molecules and methods that independently or in combination modulate the expression of genes representing cellular targets for influenza virus infection, such as cellular receptors, cell surface molecules, cellular enzymes, cellular transcription factors, and/or cytokines, second messengers, and cellular accessory molecules including, but not limited to, interleukin-6 (IL-6), ribosomal subunit 6 (RS6), RRS1, transforming growth factor beta (TGF-beta), TGF-beta inducible early protein, and zinc finger protein A20 (see for example Geiss et al., 2001, J. Virology, 75: 4321-4331).

[0019] Due to the high sequence variability of the influenza genome, selection of siNA molecules for broad therapeutic applications would likely involve the conserved regions of the influenza genome. In one embodiment, the present invention relates to siNA molecules that target the conserved regions of the influenza genome. Examples of conserved regions of the influenza genome include, but are not limited to, the M gene, the PA gene, the PB1 gene, and the PB2 gene. Therefore, a siNA molecule can be designed to target the different isolates of influenza by targeting a conserved region, such as conserved sequences herein (see for example target sequences in Table II and Table III). siNA molecules designed to target conserved regions of various influenza isolates enable efficient inhibition of influenza replication in diverse patient populations and ensure the effectiveness of the siNA molecules against influenza quasi species which evolve due to mutations in the non-conserved regions of the influenza genome. As described, a single siNA molecule can be targeted against all isolates of influenza by designing the siNA molecule to interact with conserved nucleotide sequences of influenza (e.g., sequences that are expected to be present in the RNA of various influenza isolates).

[0020] In one embodiment, the invention features a double stranded nucleic acid molecule, such as an siNA molecule, where one of the strands comprises nucleotide sequence having complementarity to a predetermined nucleotide sequence in an influenza target nucleic acid molecule, or a portion thereof. In one embodiment, the predetermined nucleotide sequence is an influenza nucleotide target sequence described herein. In another embodiment, the predetermined nucleotide sequence is an influenza target sequence as is known in the art.

[0021] In one embodiment, the invention features a double-stranded short interfering nucleic acid (siNA) molecule that down-regulates expression of an influenza target gene or that directs cleavage of an influenza target RNA, wherein said siNA molecule comprises about 15 to about 28 base pairs.

[0022] In one embodiment, the invention features a double-stranded short interfering nucleic acid (siNA) molecule that directs cleavage of an influenza target RNA, wherein said siNA molecule comprises about 15 to about 28 base pairs.

[0023] In one embodiment, the invention features a double stranded short interfering nucleic acid (siNA) molecule that directs cleavage of an influenza target RNA via RNA interference (RNAi), wherein the double stranded siNA molecule comprises a first and a second strand, each strand of the siNA molecule is about 18 to about 28 nucleotides in length, the first strand of the siNA molecule comprises nucleotide sequence having sufficient complementarity to the influenza target RNA for the siNA molecule to direct cleavage of the influenza target RNA via RNA interference, and the second strand of said siNA molecule comprises nucleotide sequence that is complementary to the first strand.

[0024] In one embodiment, the invention features a double stranded short interfering nucleic acid (siNA) molecule that directs cleavage of an influenza target RNA via RNA interference (RNAi), wherein the double stranded siNA molecule comprises a first and a second strand, each strand of the siNA molecule is about 18 to about 23 nucleotides in length, the first strand of the siNA molecule comprises nucleotide sequence having sufficient complementarity to the influenza target RNA for the siNA molecule to direct cleavage of the influenza target RNA via RNA interference, and the second strand of said siNA molecule comprises nucleotide sequence that is complementary to the first strand.

[0025] In one embodiment, the invention features a chemically synthesized double stranded short interfering nucleic acid (siNA) molecule that directs cleavage of an influenza target RNA via RNA interference (RNAi), wherein each strand of the siNA molecule is about 18 to about 28 nucleotides in length; and one strand of the siNA molecule comprises nucleotide sequence having sufficient complementarity to the influenza target RNA for the siNA molecule to direct cleavage of the influenza target RNA via RNA interference.

[0026] In one embodiment, the invention features a chemically synthesized double stranded short interfering nucleic acid (siNA) molecule that directs cleavage of an influenza target RNA via RNA interference (RNAi), wherein each strand of the siNA molecule is about 18 to about 23 nucleotides in length; and one strand of the siNA molecule comprises nucleotide sequence having sufficient complementarity to the influenza target RNA for the siNA molecule to direct cleavage of the influenza target RNA via RNA interference.

[0027] In one embodiment, the invention features a siNA molecule that down-regulates expression of an influenza target gene or that directs cleavage of an influenza target RNA, for example, wherein the influenza target gene or RNA comprises protein encoding sequence. In one embodiment, the invention features a siNA molecule that down-regulates expression of an influenza target gene or that directs cleavage of an influenza target RNA, for example, wherein the influenza target gene or RNA comprises non-coding sequence or regulatory elements involved in influenza gene expression (e.g., non-coding RNA) or actiivty.

[0028] In one embodiment, a siNA of the invention is used to inhibit the expression of influenza target genes or an influenza target gene family, wherein the genes or gene family sequences share sequence homology. Such homologous sequences can be identified as is known in the art, for example using sequence alignments. siNA molecules can be designed to target such homologous sequences, for example using perfectly complementary sequences, partially complementary sequences, or by incorporating non-canonical base pairs, for example mismatches and/or wobble base pairs, that can provide additional target sequences. In instances where mismatches are identified, non-canonical base pairs (for example, mismatches and/or wobble bases) can be used to generate siNA molecules that target more than one influenza gene sequence. In a non-limiting example, non-canonical base pairs such as UU and CC base pairs are used to generate siNA molecules that are capable of targeting sequences for differing polynucleotide targets that share sequence homology. As such, one advantage of using siNAs of the invention is that a single siNA can be designed to include nucleic acid sequence that is complementary to the nucleotide sequence that is conserved between the homologous genes. In this approach, a single siNA can be used to inhibit expression of more than one influenza gene instead of using more than one siNA molecule to target the different genes. In one embodiment, the gene family consists of a group of different serotypes of an influenza virus (e.g., different combinations of HA, e.g., H1, H2, H3, H4, H5, H6, H7, H8, H9, H10, H11, H12, H13, H14, H15, H16; and NA, e.g., N1, N2, N3, N4, N5, N6, N7, N8 or N9 genes). In one embodiment, the gene family consists of a group of different species of influenza virus (e.g., influenza A, influenza B, and/or influenza C).

[0029] In one embodiment, the invention features a siNA molecule having RNAi activity against influenza target RNA (e.g., coding or non-coding RNA), wherein the siNA molecule comprises a sequence complementary to any influenza RNA sequence, such as those sequences having GenBank Accession Nos. shown in Table I herein. In another embodiment, the invention features a siNA molecule having RNAi activity against influenza target RNA, wherein the siNA molecule comprises a sequence complementary to an RNA having variant encoding sequence, for example other influenza genes known in the art to be associated with the maintenance and/or development of influenza virus infection. Chemical modifications as shown in Table I or otherwise described herein can be applied to any siNA construct of the invention. In another embodiment, a siNA molecule of the invention includes a nucleotide sequence that can interact with nucleotide sequence of an influenza target gene and thereby mediate silencing of the influenza target gene expression, for example, wherein the siNA mediates regulation of influenza target gene expression by cellular processes that modulate the chromatin structure or methylation patterns of the target gene and prevent transcription of the target gene.

[0030] In one embodiment of the invention a siNA molecule comprises an antisense strand comprising a nucleotide sequence that is complementary to a nucleotide sequence or a portion thereof encoding a target protein. The siNA further comprises a sense strand, wherein said sense strand comprises a nucleotide sequence of a target gene or a portion thereof.

[0031] In another embodiment, a siNA molecule comprises an antisense region comprising a nucleotide sequence that is complementary to a nucleotide sequence encoding an influenza protein or a portion thereof. The siNA molecule further comprises a sense region, wherein said sense region comprises a nucleotide sequence of an influenza gene or a portion thereof.

[0032] In another embodiment, the invention features a siNA molecule comprising nucleotide sequence, for example, nucleotide sequence in the antisense region of the siNA molecule that is complementary to a nucleotide sequence or portion of sequence of an influenza gene. In another embodiment, the invention features a siNA molecule comprising a region, for example, the antisense region of the siNA construct, complementary to a sequence comprising an influenza gene sequence or a portion thereof.

[0033] In yet another embodiment, the invention features a siNA molecule comprising a sequence, for example, the antisense sequence of the siNA construct, complementary to a sequence or portion of sequence comprising sequence represented by GenBank Accession Nos. shown in Table I herein. Chemical modifications in Table IV and otherwise described herein can be applied to any siNA construct of the invention.

[0034] In one embodiment of the invention a siNA molecule comprises an antisense strand having about 15 to about 30 (e.g., about 15, 16, 17, 18, 19, 20, 21, 22, 23, 24, 25, 26, 27, 28, 29, or 30) nucleotides, wherein the antisense strand is complementary to an influenza RNA sequence or a portion thereof, and wherein said siNA further comprises a sense strand having about 15 to about 30 (e.g., about 15, 16, 17, 18, 19, 20, 21, 22, 23, 24, 25, 26, 27, 28, 29, or 30) nucleotides, and wherein said sense strand and said antisense strand are distinct nucleotide sequences where at least about 15 nucleotides in each strand are complementary to the other strand.

[0035] In one embodiment, a siNA molecule of the invention has RNAi activity that modulates expression of RNA encoded by one or more influenza genes. Because influenza genes can share some degree of sequence homology with each other, siNA molecules can be designed to target a class of influenza genes (e.g., multiple serotypes) or alternately specific genes (e.g., particular serotypes) by selecting sequences that are either shared amongst different influenza gene targets or alternatively that are unique for a specific influenza gene target. Therefore, in one embodiment, the siNA molecule can be designed to target conserved regions of influenza RNA sequences having homology among several influenza variants so as to target a class of influenza genes (e.g., multiple serotypes) with one siNA molecule. In one embodiment, siNA molecules of the invention that target conserved regions of the influenza virus genome are useful to prevent escape mutants of the influenza virus. Therefore, a therapeutic composition comprising one or more siNA molecules of the invention can be used to treat large patient populations more effectively and prevent viral resistance to such therapy.

[0036] In one embodiment, nucleic acid molecules of the invention that act as mediators of the RNA interference gene silencing response are double-stranded nucleic acid molecules. In another embodiment, the siNA molecules of the invention consist of duplex nucleic acid molecules containing about 15 to about 30 base pairs between oligonucleotides comprising about 15 to about 30 (e.g., about 15, 16, 17, 18, 19, 20, 21, 22, 23, 24, 25, 26, 27, 28, 29, or 30) nucleotides. In yet another embodiment, siNA molecules of the invention comprise duplex nucleic acid molecules with overhanging ends of about 1 to about 3 (e.g., about 1, 2, or 3) nucleotides, for example, about 21-nucleotide duplexes with about 19 base pairs and 3′-terminal mononucleotide, dinucleotide, or trinucleotide overhangs. In yet another embodiment, siNA molecules of the invention comprise duplex nucleic acid molecules with blunt ends, where both ends are blunt, or alternatively, where one of the ends is blunt.

[0037] In one embodiment, the invention features one or more chemically-modified siNA constructs having specificity for influenza target nucleic acid molecules, such as influenza RNA encoding a viral protein or non-coding RNA associated with the expression of influenza genes. In one embodiment, the invention features a RNA based siNA molecule (e.g., a siNA comprising 2′-OH nucleotides) having specificity for influenza target nucleic acid molecules that includes one or more chemical modifications described herein. Non-limiting examples of such chemical modifications include without limitation phosphorothioate internucleotide linkages, 2′-deoxyribonucleotides, 2′-O-methyl ribonucleotides, 2′-deoxy-2′-fluoro ribonucleotides, 4′-thio ribonucleotides, 2′-O-trifluoromethyl nucleotides, 2′-O-ethyl-trifluoromethoxy nucleotides, 2′-O-difluoromethoxy-ethoxy nucleotides (see for example U.S. Ser. No. 10/981,966 filed Nov. 5, 2004, incorporated by reference herein), “universal base” nucleotides, “acyclic” nucleotides, 5-C-methyl nucleotides, and terminal glyceryl and/or inverted deoxy abasic residue incorporation. These chemical modifications, when used in various siNA constructs, (e.g., RNA based siNA constructs), are shown to preserve RNAi activity in cells while at the same time, dramatically increasing the serum stability of these compounds. Furthermore, contrary to the data published by Parrish et al., supra, applicant demonstrates that multiple (greater than one) phosphorothioate substitutions are well-tolerated and confer substantial increases in serum stability for modified siNA constructs.

[0038] In one embodiment, a siNA molecule of the invention comprises modified nucleotides while maintaining the ability to mediate RNAi. The modified nucleotides can be used to improve in vitro or in vivo characteristics such as stability, activity, toxicity, immune response, and/or bioavailability. For example, a siNA molecule of the invention can comprise modified nucleotides as a percentage of the total number of nucleotides present in the siNA molecule. As such, a siNA molecule of the invention can generally comprise about 5% to about 100% modified nucleotides (e.g., about 5%, 10%, 15%, 20%, 25%, 30%, 35%, 40%, 45%, 50%, 55%, 60%, 65%, 70%, 75%, 80%, 85%, 90%, 95% or 100% modified nucleotides). For example, in one embodiment, between about 5% to about 100% (e.g., about 5%, 10%, 15%, 20%, 25%, 30%, 35%, 40%, 45%, 50%, 55%, 60%, 65%, 70%, 75%, 80%, 85%, 90%, 95% or 100% modified nucleotides) of the nucleotide positions in a siNA molecule of the invention comprise a nucleic acid sugar modification, such as a 2′-sugar modification, e.g., 2′-O-methyl nucleotides, 2′-deoxy-2′-fluoro nucleotides, 2′-O-methoxyethyl nucleotides, 2′-O-trifluoromethyl nucleotides, 2′-O-ethyl-trifluoromethoxy nucleotides, 2′-O-difluoromethoxy-ethoxy nucleotides, or 2′-deoxy nucleotides. In another embodiment, between about 5% to about 100% (e.g., about 5%, 10%, 15%, 20%, 25%, 30%, 35%, 40%, 45%, 50%, 55%, 60%, 65%, 70%, 75%, 80%, 85%, 90%, 95% or 100% modified nucleotides) of the nucleotide positions in a siNA molecule of the invention comprise a nucleic acid base modification, such as inosine, purine, pyridin-4-one, pyridin-2-one, phenyl, pseudouracil, 2, 4, 6-trimethoxy benzene, 3-methyl uracil, dihydrouridine, naphthyl, aminophenyl, 5-alkylcytidines (e.g., 5-methylcytidine), 5-alkyluridines (e.g., ribothymidine), 5-halouridine (e.g., 5-bromouridine) or 6-azapyrimidines or 6-alkylpyrimidines (e.g. 6-methyluridine), or propyne modifications. In another embodiment, between about 5% to about 100% (e.g., about 5%, 10%, 15%, 20%, 25%, 30%, 35%, 40%, 45%, 50%, 55%, 60%, 65%, 70%, 75%, 80%, 85%, 90%, 95% or 100% modified nucleotides) of the nucleotide positions in a siNA molecule of the invention comprise a nucleic acid backbone modification, such as a backbone modification having Formula I herein. In another embodiment, between about 5% to about 100% (e.g., about 5%, 10%, 15%, 20%, 25%, 30%, 35%, 40%, 45%, 50%, 55%, 60%, 65%, 70%, 75%, 80%, 85%, 90%, 95% or 100% modified nucleotides) of the nucleotide positions in a siNA molecule of the invention comprise a nucleic acid sugar, base, or backbone modification or any combination thereof (e.g., any combination of nucleic acid sugar, base, backbone or non-nucleotide modifications herein). The actual percentage of modified nucleotides present in a given siNA molecule will depend on the total number of nucleotides present in the siNA. If the siNA molecule is single stranded, the percent modification can be based upon the total number of nucleotides present in the single stranded siNA molecules. Likewise, if the siNA molecule is double stranded, the percent modification can be based upon the total number of nucleotides present in the sense strand, antisense strand, or both the sense and antisense strands.

[0039] A siNA molecule of the invention can comprise modified nucleotides at various locations within the siNA molecule. In one embodiment, a double stranded siNA molecule of the invention comprises modified nucleotides at internal base paired positions within the siNA duplex. For example, internal positions can comprise positions from about 3 to about 19 nucleotides from the 5′-end of either sense or antisense strand or region of a 21 nucleotide siNA duplex having 19 base pairs and two nucleotide 3′-overhangs. In another embodiment, a double stranded siNA molecule of the invention comprises modified nucleotides at non-base paired or overhang regions of the siNA molecule. For example, overhang positions can comprise positions from about 20 to about 21 nucleotides from the 5′-end of either sense or antisense strand or region of a 21 nucleotide siNA duplex having 19 base pairs and two nucleotide 3′-overhangs. In another embodiment, a double stranded siNA molecule of the invention comprises modified nucleotides at terminal positions of the siNA molecule. For example, such terminal regions include the 3′-position, 5′-position, for both 3′ and 5′-positions of the sense and/or antisense strand or region of the siNA molecule. In another embodiment, a double stranded siNA molecule of the invention comprises modified nucleotides at base-paired or internal positions, non-base paired or overhang regions, and/or terminal regions, or any combination thereof.

[0040] One aspect of the invention features a double-stranded short interfering nucleic acid (siNA) molecule that down-regulates expression of an influenza target gene or that directs cleavage of an influenza target RNA. In one embodiment, the double stranded siNA molecule comprises one or more chemical modifications and each strand of the double-stranded siNA is about 21 nucleotides long. In one embodiment, the double-stranded siNA molecule does not contain any ribonucleotides. In another embodiment, the double-stranded siNA molecule comprises one or more ribonucleotides. In one embodiment, each strand of the double-stranded siNA molecule independently comprises about 15 to about 30 (e.g., about 15, 16, 17, 18, 19, 20, 21, 22, 23, 24, 25, 26, 27, 28, 29, or 30) nucleotides, wherein each strand comprises about 15 to about 30 (e.g., about 15, 16, 17, 18, 19, 20, 21, 22, 23, 24, 25, 26, 27, 28, 29, or 30) nucleotides that are complementary to the nucleotides of the other strand. In one embodiment, one of the strands of the double-stranded siNA molecule comprises a nucleotide sequence that is complementary to a nucleotide sequence or a portion thereof of the influenza target gene, and the second strand of the double-stranded siNA molecule comprises a nucleotide sequence substantially similar to the nucleotide sequence of the influenza target gene or a portion thereof.

[0041] In another embodiment, the invention features a double-stranded short interfering nucleic acid (siNA) molecule that down-regulates expression of an influenza target gene or that directs cleavage of an influenza target RNA, comprising an antisense region, wherein the antisense region comprises a nucleotide sequence that is complementary to a nucleotide sequence of the influenza target gene or a portion thereof, and a sense region, wherein the sense region comprises a nucleotide sequence substantially similar to the nucleotide sequence of the influenza target gene or a portion thereof. In one embodiment, the antisense region and the sense region independently comprise about 15 to about 30 (e.g. about 15, 16, 17, 18, 19, 20, 21, 22, 23, 24, 25, 26, 27, 28, 29, or 30) nucleotides, wherein the antisense region comprises about 15 to about 30 (e.g. about 15, 16, 17, 18, 19, 20, 21, 22, 23, 24, 25, 26, 27, 28, 29, or 30) nucleotides that are complementary to nucleotides of the sense region.

[0042] In another embodiment, the invention features a double-stranded short interfering nucleic acid (siNA) molecule that down-regulates expression of an influenza target gene or that directs cleavage of an influenza target RNA, comprising a sense region and an antisense region, wherein the antisense region comprises a nucleotide sequence that is complementary to a nucleotide sequence of RNA encoded by the target influenza gene or a portion thereof and the sense region comprises a nucleotide sequence that is complementary to the antisense region.

[0043] In one embodiment, a siNA molecule of the invention comprises blunt ends, i.e., ends that do not include any overhanging nucleotides. For example, a siNA molecule comprising modifications described herein (e.g., comprising nucleotides having Formulae I-VII or siNA constructs comprising “Stab 00”-“Stab 34” or “Stab 3F”-“Stab 34F” (Table IV) or any combination thereof (see Table IV)) and/or any length described herein can comprise blunt ends or ends with no overhanging nucleotides.

[0044] In one embodiment, any siNA molecule of the invention can comprise one or more blunt ends, i.e. where a blunt end does not have any overhanging nucleotides. In one embodiment, the blunt ended siNA molecule has a number of base pairs equal to the number of nucleotides present in each strand of the siNA molecule. In another embodiment, the siNA molecule comprises one blunt end, for example wherein the 5′-end of the antisense strand and the 3′-end of the sense strand do not have any overhanging nucleotides. In another example, the siNA molecule comprises one blunt end, for example wherein the 3′-end of the antisense strand and the 5′-end of the sense strand do not have any overhanging nucleotides. In another example, a siNA molecule comprises two blunt ends, for example wherein the 3′-end of the antisense strand and the 5′-end of the sense strand as well as the 5′-end of the antisense strand and 3′-end of the sense strand do not have any overhanging nucleotides. A blunt ended siNA molecule can comprise, for example, from about 15 to about 30 nucleotides (e.g., about 15, 16, 17, 18, 19, 20, 21, 22, 23, 24, 25, 26, 27, 28, 29, or 30 nucleotides). Other nucleotides present in a blunt ended siNA molecule can comprise, for example, mismatches, bulges, loops, or wobble base pairs to modulate the activity of the siNA molecule to mediate RNA interference.

[0045] By “blunt ends” is meant symmetric termini or termini of a double stranded siNA molecule having no overhanging nucleotides. The two strands of a double stranded siNA molecule align with each other without over-hanging nucleotides at the termini. For example, a blunt ended siNA construct comprises terminal nucleotides that are complementary between the sense and antisense regions of the siNA molecule.

[0046] In one embodiment, the invention features a double-stranded short interfering nucleic acid (siNA) molecule that down-regulates expression of an influenza target gene or that directs cleavage of an influenza target RNA, wherein the siNA molecule is assembled from two separate oligonucleotide fragments wherein one fragment comprises the sense region and the second fragment comprises the antisense region of the siNA molecule. The sense region can be connected to the antisense region via a linker molecule, such as a polynucleotide linker or a non-nucleotide linker.

[0047] In one embodiment, a siNA molecule of the invention is a double-stranded short interfering nucleic acid (siNA), wherein the double stranded nucleic acid molecule comprises about 15 to about 30 (e.g. about 15, 16, 17, 18, 19, 20, 21, 22, 23, 24, 25, 26, 27, 28, 29, or 30) base pairs, and wherein one or more (e.g., at least 1, 2, 3, 4, 5, 6, 7, 8, 9, 10, 11, 12, 13, 14, 15, 16, 17, 18, 19, 20, 21, 22, 23, 24, 25, 26, 27, 28, 29, or 30) of the nucleotide positions in each strand of the siNA molecule comprises a chemical modification. In another embodiment, the siNA contains at least 2, 3, 4, 5, or more different chemical modifications.

[0048] In one embodiment, the invention features double-stranded short interfering nucleic acid (siNA) molecule that down-regulates expression of an influenza target gene or that directs cleavage of an influenza target RNA, wherein the siNA molecule comprises about 15 to about 30 (e.g. about 15, 16, 17, 18, 19, 20, 21, 22, 23, 24, 25, 26, 27, 28, 29, or 30) base pairs, and wherein each strand of the siNA molecule comprises one or more chemical modifications. In one embodiment, each strand of the double stranded siNA molecule comprises at least two (e.g., 2, 3, 4, 5, or more) different chemical modifications, e.g., different nucleotide sugar, base, or backbone modifications. In another embodiment, one of the strands of the double-stranded siNA molecule comprises a nucleotide sequence that is complementary to a nucleotide sequence of an influenza target gene or a portion thereof, and the second strand of the double-stranded siNA molecule comprises a nucleotide sequence substantially similar to the nucleotide sequence or a portion thereof of the influenza target gene. In another embodiment, one of the strands of the double-stranded siNA molecule comprises a nucleotide sequence that is complementary to a nucleotide sequence of an influenza target gene or portion thereof, and the second strand of the double-stranded siNA molecule comprises a nucleotide sequence substantially similar to the nucleotide sequence or portion thereof of the influenza target gene. In another embodiment, each strand of the siNA molecule comprises about 15 to about 30 (e.g. about 15, 16, 17, 18, 19, 20, 21, 22, 23, 24, 25, 26, 27, 28, 29, or 30) nucleotides, and each strand comprises at least about 15 to about 30 (e.g. about 15, 16, 17, 18, 19, 20, 21, 22, 23, 24, 25, 26, 27, 28, 29, or 30) nucleotides that are complementary to the nucleotides of the other strand. The influenza target gene can comprise, for example, sequences referred to herein or incorporated herein by reference.

[0049] In one embodiment, each strand of a double stranded siNA molecule of the invention comprises a different pattern of chemical modifications, such as any “Stab 00”-“Stab 34” or “Stab 3F”-“Stab 34F” (Table IV) modification patterns herein or any combination thereof (see Table IV). Non-limiting examples of sense and antisense strands of such siNA molecules having various modification patterns are shown in Table HI.

[0050] In one embodiment, a siNA molecule of the invention comprises no ribonucleotides. In another embodiment, a siNA molecule of the invention comprises ribonucleotides.

[0051] In one embodiment, a siNA molecule of the invention comprises an antisense region comprising a nucleotide sequence that is complementary to a nucleotide sequence of an influenza target gene or a portion thereof, and the siNA further comprises a sense region comprising a nucleotide sequence substantially similar to the nucleotide sequence of the influenza target gene or a portion thereof. In another embodiment, the antisense region and the sense region each comprise about 15 to about 30 (e.g. about 15, 16, 17, 18, 19, 20, 21, 22, 23, 24, 25, 26, 27, 28, 29, or 30) nucleotides and the antisense region comprises at least about 15 to about 30 (e.g. about 15, 16, 17, 18, 19, 20, 21, 22, 23, 24, 25, 26, 27, 28, 29, or 30) nucleotides that are complementary to nucleotides of the sense region. In one embodiment, each strand of the double stranded siNA molecule comprises at least two (e.g., 2, 3, 4, 5, or more) different chemical modifications, e.g., different nucleotide sugar, base, or backbone modifications. The influenza target gene can comprise, for example, sequences referred to herein or incorporated by reference herein. In another embodiment, the siNA is a double stranded nucleic acid molecule, where each of the two strands of the siNA molecule independently comprise about 15 to about 40 (e.g. about 15, 16, 17, 18, 19, 20, 21, 22, 23, 24, 25, 26, 27, 28, 29, 30, 31, 23, 33, 34, 35, 36, 37, 38, 39, or 40) nucleotides, and where one of the strands of the siNA molecule comprises at least about 15 (e.g. about 15, 16, 17, 18, 19, 20, 21, 22, 23, 24 or 25 or more) nucleotides that are complementary to the nucleic acid sequence of the influenza target gene or a portion thereof.

[0052] In one embodiment, a siNA molecule of the invention comprises a sense region and an antisense region, wherein the antisense region comprises a nucleotide sequence that is complementary to a nucleotide sequence of RNA encoded by an influenza target gene, or a portion thereof, and the sense region comprises a nucleotide sequence that is complementary to the antisense region. In one embodiment, the siNA molecule is assembled from two separate oligonucleotide fragments, wherein one fragment comprises the sense region and the second fragment comprises the antisense region of the siNA molecule. In another embodiment, the sense region is connected to the antisense region via a linker molecule. In another embodiment, the sense region is connected to the antisense region via a linker molecule, such as a nucleotide or non-nucleotide linker. In one embodiment, each strand of the double stranded siNA molecule comprises at least two (e.g., 2, 3, 4, 5, or more) different chemical modifications, e.g., different nucleotide sugar, base, or backbone modifications. The influenza target gene can comprise, for example, sequences referred. herein or incorporated by reference herein

[0053] In one embodiment, the invention features a double-stranded short interfering nucleic acid (siNA) molecule that down-regulates expression of an influenza target gene or that directs cleavage of an influenza target RNA, comprising a sense region and an antisense region, wherein the antisense region comprises a nucleotide sequence that is complementary to a nucleofide sequence of RNA encoded by the influenza gene or a portion thereof and the sense region comprises a nucleotide sequence that is complementary to the antisense region, and wherein the siNA molecule has one or more modified pyrimidine and/or purine nucleotides. In one embodiment, each strand of the double stranded siNA molecule comprises at least two (e.g., 2, 3, 4, 5, or more) different chemical modifications, e.g., different nucleotide sugar, base, or backbone modifications. In one embodiment, the pyrimidine nucleotides in the sense region are 2′-O-methyl pyrimidine nucleotides or 2′-deoxy-2′-fluoro pyrimidine nucleotides and the purine nucleotides present in the sense region are 2′-deoxy purine nucleotides. In another embodiment, the pyrimidine nucleotides in the sense region are 2′-deoxy-2′-fluoro pyrimidine nucleotides and the purine nucleotides present in the sense region are 2′-O-methyl purine nucleotides. In another embodiment, the pyrimidine nucleotides in the sense region are 2′-deoxy-2′-fluoro pyrimidine nucleotides and the purine nucleotides present in the sense region are 2′-deoxy purine nucleotides. In one embodiment, the pyrimidine nucleotides in the antisense region are 2′-deoxy-2′-fluoro pyrimidine nucleotides and the purine nucleotides present in the antisense region are 2′-O-methyl or 2′-deoxy purine nucleotides. In another embodiment of any of the above-described siNA molecules, any nucleotides present in a non-complementary region of the sense strand (e.g. overhang region) are 2′-deoxy nucleotides.

[0054] In one embodiment, the invention features a double-stranded short interfering nucleic acid (siNA) molecule that down-regulates expression of an influenza target gene or that directs cleavage of an influenza target RNA, wherein the siNA molecule is assembled from two separate oligonucleotide fragments wherein one fragment comprises the sense region and the second fragment comprises the antisense region of the siNA molecule, and wherein the fragment comprising the sense region includes a terminal cap moiety at the 5′-end, the 3′-end, or both of the 5′ and 3′ ends of the fragment. In one embodiment, the terminal cap moiety is an inverted deoxy abasic moiety or glyceryl moiety. In one embodiment, each of the two fragments of the siNA molecule independently comprise about 15 to about 30 (e.g. about 15, 16, 17, 18, 19, 20, 21, 22, 23, 24, 25, 26, 27, 28, 29, or 30) nucleotides. In another embodiment, each of the two fragments of the siNA molecule independently comprise about 15 to about 40 (e.g. about 15, 16, 17, 18, 19, 20, 21, 22, 23, 24, 25, 26, 27, 28, 29, 30, 31, 23, 33, 34, 35, 36, 37, 38, 39, or 40) nucleotides. In a non-limiting example, each of the two fragments of the siNA molecule comprise about 21 nucleotides.

[0055] In one embodiment, the invention features a siNA molecule comprising at least one modified nucleotide, wherein the modified nucleotide is a 2′-deoxy-2′-fluoro nucleotide, 2′-O-trifluoromethyl nucleotide, 2′-O-ethyl-trifluoromethoxy nucleotide, or 2′-O-difluoromethoxy-ethoxy nucleotide or any other modified nucleoside/nucleotide described herein and in U.S. Ser. No. 10/981,966, filed Nov. 5, 2004, incorporated by reference herein. In one embodiment, the invention features a siNA molecule comprising at least two (e.g., 2, 3, 4, 5, 6, 7, 8, 9, 10, or more) modified nucleotides, wherein the modified nucleotide is selected from the group consisting of 2′-deoxy-2′-fluoro nucleotide, 2′-O-trifluoromethyl nucleotide, 2′-O-ethyl-trifluoromethoxy nucleotide, or 2′-O-difluoromethoxy-ethoxy nucleotide or any other modified nucleoside/nucleotide described herein and in U.S. Ser. No. 10/981,966, filed Nov. 5, 2004, incorporated by reference herein. The modified nucleotide/nucleoside can be the same or different. The siNA can be, for example, about 15 to about 40 nucleotides in length. In one embodiment, all pyrimidine nucleotides present in the siNA are 2′-deoxy-2′-fluoro, 2′-O-trifluoromethyl, 2′-O-ethyl-trifluoromethoxy, or 2′-O-difluoromethoxy-ethoxy, 4′-thio pyrimidine nucleotides. In one embodiment, the modified nucleotides in the siNA include at least one 2′-deoxy-2′-fluoro cytidine or 2′-deoxy-2′-fluoro uridine nucleotide. In another embodiment, the modified nucleotides in the siNA include at least one 2′-fluoro cytidine and at least one 2′-deoxy-2′-fluoro uridine nucleotides. In one embodiment, all uridine nucleotides present in the siNA are 2′-deoxy-2′-fluoro uridine nucleotides. In one embodiment, all cytidine nucleotides present in the siNA are 2′-deoxy-2′-fluoro cytidine nucleotides. In one embodiment, all adenosine nucleotides present in the siNA are 2′-deoxy-2′-fluoro adenosine nucleotides. In one embodiment, all guanosine nucleotides present in the siNA are 2′-deoxy-2′-fluoro guanosine nucleotides. The siNA can further comprise at least one modified intemucleotidic linkage, such as phosphorothioate linkage. In one embodiment, the 2′-deoxy-2′-fluoronucleotides are present at specifically selected locations in the siNA that are sensitive to cleavage by ribonucleases, such as locations having pyrimidine nucleotides.

[0056] In one embodiment, the invention features a method of increasing the stability of a siNA molecule against cleavage by ribonucleases comprising introducing at least one modified nucleotide into the siNA molecule, wherein the modified nucleotide is a 2′-deoxy-2′-fluoro nucleotide. In one embodiment, all pyrimidine nucleotides present in the siNA are 2′-deoxy-2′-fluoro pyrimidine nucleotides. In one embodiment, the modified nucleotides in the siNA include at least one 2′-deoxy-2′-fluoro cytidine or 2′-deoxy-2′-fluoro uridine nucleotide. In another embodiment, the modified nucleotides in the siNA include at least one 2′-fluoro cytidine and at least one 2′-deoxy-2′-fluoro uridine nucleotides. In one embodiment, all uridine nucleotides present in the siNA are 2′-deoxy-2′-fluoro uridine nucleotides. In one embodiment, all cytidine nucleotides present in the siNA are 2′-deoxy-2′-fluoro cytidine nucleotides. In one embodiment, all adenosine nucleotides present in the siNA are 2′-deoxy-2′-fluoro adenosine nucleotides. In one embodiment, all guanosine nucleotides present in the siNA are 2′-deoxy-2′-fluoro guanosine nucleotides. The siNA can further comprise at least one modified intemucleotidic linkage, such as a phosphorothioate linkage. In one embodiment, the 2′-deoxy-2′-fluoronucleotides are present at specifically selected locations in the siNA that are sensitive to cleavage by ribonucleases, such as locations having pyrimidine nucleotides.

[0057] In one embodiment, the invention features a double-stranded short interfering nucleic acid (siNA) molecule that down-regulates expression of an influenza target gene or that directs cleavage of an influenza target RNA, comprising a sense region and an antisense region, wherein the antisense region comprises a nucleotide sequence that is complementary to a nucleotide sequence of RNA encoded by the influenza gene or a portion thereof and the sense region comprises a nucleotide sequence that is complementary to the antisense region, and wherein the purine nucleotides present in the antisense region comprise 2′-deoxy- purine nucleotides. In an alternative embodiment, the purine nucleotides present in the antisense region comprise 2′-O-methyl purine nucleotides. In either of the above embodiments, the antisense region can comprise a phosphorothioate internucleotide linkage at the 3′ end of the antisense region. Alternatively, in either of the above embodiments, the antisense region can comprise a glyceryl modification at the 3′ end of the antisense region. In another embodiment of any of the above-described siNA molecules, any nucleotides present in a non-complementary region of the antisense strand (e.g. overhang region) are 2′-deoxy nucleotides.

[0058] In one embodiment, the invention features a double-stranded short interfering nucleic acid (siNA) molecule that down-regulates expression of an influenza target gene or that directs cleavage of an influenza target RNA, wherein the siNA molecule is assembled from two separate oligonucleotide fragments wherein one fragment comprises the sense region and the second fragment comprises the antisense region of the siNA molecule. In one embodiment, each strand of the double stranded siNA molecule is about 21 nucleotides long where about 19 nucleotides of each fragment of the siNA molecule are base-paired to the complementary nucleotides of the other fragment of the siNA molecule, wherein at least two 3′ terminal nucleotides of each fragment of the siNA molecule are not base-paired to the nucleotides of the other fragment of the siNA molecule. In another embodiment, the siNA molecule is a double stranded nucleic acid molecule, where each strand is about 19 nucleotide long and where the nucleotides of each fragment of the siNA molecule are base-paired to the complementary nucleotides of the other fragment of the siNA molecule to form at least about 15 (e.g., 15, 16, 17, 18, or 19) base pairs, wherein one or both ends of the siNA molecule are blunt ends. In one embodiment, each of the two 3′ terminal nucleotides of each fragment of the siNA molecule is a 2′-deoxy-pyrimidine nucleotide, such as a 2′-deoxy-thymidine. In another embodiment, all nucleotides of each fragment of the siNA molecule are base-paired to the complementary nucleotides of the other fragment of the siNA molecule. In another embodiment, the siNA molecule is a double stranded nucleic acid molecule of about 19 to about 25 base pairs having a sense region and an antisense region, where about 19 nucleotides of the antisense region are base-paired to the nucleotide sequence or a portion thereof of the RNA encoded by the influenza target gene. In another embodiment, about 21 nucleotides of the antisense region are base-paired to the nucleotide sequence or a portion thereof of the RNA encoded by the influenza target gene. In any of the above embodiments, the 5′-end of the fragment comprising said antisense region can optionally include a phosphate group.

[0059] In one embodiment, the invention features a double-stranded short interfering nucleic acid (siNA) molecule that inhibits the expression of a target RNA sequence, wherein the siNA molecule does not contain any ribonucleotides and wherein each strand of the double-stranded siNA molecule is about 15 to about 30 nucleotides. In one embodiment, the siNA molecule is 21 nucleotides in length. Examples of non-ribonucleotide containing siNA constructs are combinations of stabilization chemistries shown in Table I in any combination of Sense/Antisense chemistries, such as Stab 7/8, Stab 7/11, Stab 8/8, Stab 18/8, Stab 18/11, Stab 12/13, Stab 7/13, Stab 18/13, Stab 7/19, Stab 8/19, Stab 18/19, Stab 7/20, Stab 8/20, Stab 18/20, Stab 7/32, Stab 8/32, or Stab 18/32 (e.g., any siNA having Stab 7, 8, 11, 12, 13, 14, 15, 17, 18, 19, 20, or 32 sense or antisense strands or any combination thereof). Herein, numeric Stab chemistries can include both 2′-fluoro and 2′-OCF3 versions of the chemistries shown in Table I. For example, “Stab 7/8” refers to both Stab 7/8 and Stab 7F/8F etc. In one embodiment, the invention features a chemically synthesized double stranded RNA molecule that directs cleavage of an influenza target RNA via RNA interference, wherein each strand of said RNA molecule is about 15 to about 30 nucleotides in length; one strand of the RNA molecule comprises nucleotide sequence having sufficient complementarity to the influenza target RNA for the RNA molecule to direct cleavage of the influenza target RNA via RNA interference; and wherein at least one strand of the RNA molecule optionally comprises one or more chemically modified nucleotides described herein, such as without limitation deoxynucleotides, 2′-O-methyl nucleotides, 2′-deoxy-2′-fluoro nucleotides, 2′-O-methoxyethyl nucleotides, 4′-thio nucleotides, 2′-O-trifluoromethyl nucleotides, 2′-O-ethyl-trifluoromethoxy nucleotides, 2′-O-difluoromethoxy-ethoxy nucleotides, etc.

[0060] In one embodiment, an influenza target RNA of the invention comprises sequence encoding an influenza virus protein.

[0061] In one embodiment, an influenza target RNA of the invention comprises non-coding RNA sequence (e.g., miRNA, snRNA, siRNA etc.), see for example Mattick, 2005, Science, 309, 1527-1528 and Claverie, 2005, Science, 309, 1529-1530.

[0062] In one embodiment, the invention features a medicament comprising a siNA molecule of the invention.

[0063] In one embodiment, the invention features an active ingredient comprising a siNA molecule of the invention.

[0064] In one embodiment, the invention features the use of a double-stranded short interfering nucleic acid (siNA) molecule to inhibit, down-regulate, or reduce expression of a n influenza target gene, wherein the siNA molecule comprises one or more chemical modifications and each strand of the double-stranded siNA is independently about 15 to about 30 or more (e.g., about 15, 16, 17, 18, 19, 20, 21, 22, 23, 24, 25, 26, 27, 28, 29 or 30 or more) nucleotides long. In one embodiment, the siNA molecule of the invention is a double stranded nucleic acid molecule comprising one or more chemical modifications, where each of the two fragments of the siNA molecule independently comprise about 15 to about 40 (e.g. about 15, 16, 17, 18, 19, 20, 21, 22, 23, 24, 25, 26, 27, 28, 29, 30, 31, 23, 33, 34, 35, 36, 37, 38, 39, or 40) nucleotides and where one of the strands comprises at least 15 nucleotides that are complementary to nucleotide sequence of influenza encoding RNA or a portion thereof. In a non-limiting example, each of the two fragments of the siNA molecule comprise about 21 nucleotides. In another embodiment, the siNA molecule is a double stranded nucleic acid molecule comprising one or more chemical modifications, where each strand is about 21 nucleotide long and where about 19 nucleotides of each fragment of the siNA molecule are base-paired to the complementary nucleotides of the other fragment of the siNA molecule, wherein at least two 3′ terminal nucleotides of each fragment of the siNA molecule are not base-paired to the nucleotides of the other fragment of the siNA molecule. In another embodiment, the siNA molecule is a double stranded nucleic acid molecule comprising one or more chemical modifications, where each strand is about 19 nucleotide long and where the nucleotides of each fragment of the siNA molecule are base-paired to the complementary nucleotides of the other fragment of the siNA molecule to form at least about 15 (e.g., 15, 16, 17, 18, or 19) base pairs, wherein one or both ends of the siNA molecule are blunt ends. In one embodiment, each of the two 3′ terminal nucleotides of each fragment of the siNA molecule is a 2′-deoxy-pyrimidine nucleotide, such as a 2′-deoxy-thymidine. In another embodiment, all nucleotides of each fragment of the siNA molecule are base-paired to the complementary nucleotides of the other fragment of the siNA molecule. In another embodiment, the siNA molecule is a double stranded nucleic acid molecule of about 19 to about 25 base pairs having a sense region and an antisense region and comprising one or more chemical modifications, where about 19 nucleotides of the antisense region are base-paired to the nucleotide sequence or a portion thereof of the RNA encoded by the influenza target gene. In another embodiment, about 21 nucleotides of the antisense region are base-paired to the nucleotide sequence or a portion thereof of the RNA encoded by the influenza target gene. In any of the above embodiments, the 5′-end of the fragment comprising said antisense region can optionally include a phosphate group.

[0065] In one embodiment, the invention features the use of a double-stranded short interfering nucleic acid (siNA) molecule that inhibits, down-regulates, or reduces expression of an influenza target gene, wherein one of the strands of the double-stranded siNA molecule is an antisense strand which comprises nucleotide sequence that is complementary to nucleotide sequence of influenza target RNA or a portion thereof, the other strand is a sense strand which comprises nucleotide sequence that is complementary to a nucleotide sequence of the antisense strand. In one embodiment, each strand has at least two (e.g., 2, 3, 4, 5, or more) chemical modifications, which can be the same or different, such as nucleotide, sugar, base, or backbone modifications. In one embodiment, a majority of the pyrimidine nucleotides present in the double-stranded siNA molecule comprises a sugar modification. In one embodiment, a majority of the purine nucleotides present in the double-stranded siNA molecule comprises a sugar modification.

[0066] In one embodiment, the invention features a double-stranded short interfering nucleic acid (siNA) molecule that inhibits, down-regulates, or reduces expression of an influenza target gene, wherein one of the strands of the double-stranded siNA molecule is an antisense strand which comprises nucleotide sequence that is complementary to nucleotide sequence of influenza target RNA or a portion thereof, wherein the other strand is a sense strand which comprises nucleotide sequence that is complementary to a nucleotide sequence of the antisense strand. In one embodiment, each strand has at least two (e.g., 2, 3, 4, 5, or more) chemical modifications, which can be the same or different, such as nucleotide, sugar, base, or backbone modifications. In one embodiment, a majority of the pyrimidine nucleotides present in the double-stranded siNA molecule comprises a sugar modification. In one embodiment, a majority of the purine nucleotides present in the double-stranded siNA molecule comprises a sugar modification.

[0067] In one embodiment, the invention features a double-stranded short interfering nucleic acid (siNA) molecule that inhibits, down-regulates, or reduces expression of an influenza target gene, wherein one of the strands of the double-stranded siNA molecule is an antisense strand which comprises nucleotide sequence that is complementary to nucleotide sequence of target RNA that encodes a protein or portion thereof, the other strand is a sense strand which comprises nucleotide sequence that is complementary to a nucleotide sequence of the antisense strand and wherein a majority of the pyrimidine nucleotides present in the double-stranded siNA molecule comprises a sugar modification. In one embodiment, each strand of the siNA molecule comprises about 15 to about 30 or more (e.g., about 15, 16, 17, 18, 19, 20, 21, 22, 23, 24, 25, 26, 27, 28, 29, or 30 or more) nucleotides, wherein each strand comprises at least about 15 nucleotides that are complementary to the nucleotides of the other strand. In one embodiment, the siNA molecule is assembled from two oligonucleotide fragments, wherein one fragment comprises the nucleotide sequence of the antisense strand of the siNA molecule and a second fragment comprises nucleotide sequence of the sense region of the siNA molecule. In one embodiment, the sense strand is connected to the antisense strand via a linker molecule, such as a polynucleotide linker or a non-nucleotide linker. In a further embodiment, the pyrimidine nucleotides present in the sense strand are 2′-deoxy-2′ fluoro pyrimidine nucleotides and the purine nucleotides present in the sense region are 2′-deoxy purine nucleotides. In another embodiment, the pyrimidine nucleotides present in the sense strand are 2′-deoxy-2′ fluoro pyrimidine nucleotides and the purine nucleotides present in the sense region are 2′-O-methyl purine nucleotides. In still another embodiment, the pyrimidine nucleotides present in the antisense strand are 2′-deoxy-2′-fluoro pyrimidine nucleotides and any purine nucleotides present in the antisense strand are 2′-deoxy purine nucleotides. In another embodiment, the antisense strand comprises one or more 2′-deoxy-2′-fluoro pyrimidine nucleotides and one or more 2′-O-methyl purine nucleotides. In another embodiment, the pyrimidine nucleotides present in the antisense strand are 2′-deoxy-2′-fluoro pyrimidine nucleotides and any purine nucleotides present in the antisense strand are 2′-O-methyl purine nucleotides. In a further embodiment the sense strand comprises a 3′-end and a 5′-end, wherein a terminal cap moiety (e.g., an inverted deoxy abasic moiety or inverted deoxy nucleotide moiety such as inverted thymidine) is present at the 5′-end, the 3′-end, or both of the 5′ and 3′ ends of the sense strand. In another embodiment, the antisense strand comprises a phosphorothioate internucleotide linkage at the 3′ end of the antisense strand. In another embodiment, the antisense strand comprises a glyceryl modification at the 3′ end. In another embodiment, the 5′-end of the antisense strand optionally includes a phosphate group.

[0068] In any of the above-described embodiments of a double-stranded short interfering nucleic acid (siNA) molecule that inhibits expression of an influenza target gene, wherein a majority of the pyrimidine nucleotides present in the double-stranded siNA molecule comprises a sugar modification, each of the two strands of the siNA molecule can comprise about 15 to about 30 or more (e.g., about 15, 16, 17, 18, 19, 20, 21, 22, 23, 24, 25, 26, 27, 28, 29, or 30 or more) nucleotides. In one embodiment, about 15 to about 30 or more (e.g., about 15, 16, 17, 18, 19, 20, 21, 22, 23, 24, 25, 26, 27, 28, 29, or 30 or more) nucleotides of each strand of the siNA molecule are base-paired to the complementary nucleotides of the other strand of the siNA molecule. In another embodiment, about 15 to about 30 or more (e.g., about 15, 16, 17, 18, 19, 20, 21, 22, 23, 24, 25, 26, 27, 28, 29, or 30 or more) nucleotides of each strand of the siNA molecule are base-paired to the complementary nucleotides of the other strand of the siNA molecule, wherein at least two 3′ terminal nucleotides of each strand of the siNA molecule are not base-paired to the nucleotides of the other strand of the siNA molecule. In another embodiment, each of the two 3′ terminal nucleotides of each fragment of the siNA molecule is a 2′-deoxy-pyrimidine, such as 2′-deoxy-thymidine. In one embodiment, each strand of the siNA molecule is base-paired to the complementary nucleotides of the other strand of the siNA molecule. In one embodiment, about 15 to about 30 (e.g., about 15, 16, 17, 18, 19, 20, 21, 22, 23, 24, 25, 26, 27, 28, 29, or 30) nucleotides of the antisense strand are base-paired to the nucleotide sequence of the influenza target RNA or a portion thereof. In one embodiment, about 18 to about 25 (e.g., about 18, 19, 20, 21, 22, 23, 24, or 25) nucleotides of the antisense strand are base-paired to the nucleotide sequence of the influenza target RNA or a portion thereof. 100641 In one embodiment, the invention features a double-stranded short interfering nucleic acid (siNA) molecule that inhibits expression of an influenza target gene, wherein one of the strands of the double-stranded siNA molecule is an antisense strand which comprises nucleotide sequence that is complementary to nucleotide sequence of influenza target RNA or a portion thereof, the other strand is a sense strand which comprises nucleotide sequence that is complementary to a nucleotide sequence of the antisense strand. In one embodiment, each strand has at least two (e.g., 2, 3, 4, 5, or more) different chemical modifications, such as nucleotide sugar, base, or backbone modifications. In one embodiment, a majority of the pyrimidine nucleotides present in the double-stranded siNA molecule comprises a sugar modification. In one embodiment, a majority of the purine nucleotides present in the double-stranded siNA molecule comprises a sugar modification. In one embodiment, the 5′-end of the antisense strand optionally includes a phosphate group.

[0069] In one embodiment, the invention features a double-stranded short interfering nucleic acid (siNA) molecule that inhibits expression of an influenza target gene, wherein one of the strands of the double-stranded siNA molecule is an antisense strand which comprises nucleotide sequence that is complementary to nucleotide sequence of influenza target RNA or a portion thereof, the other strand is a sense strand which comprises nucleotide sequence that is complementary to a nucleotide sequence of the antisense strand and wherein a majority of the pyrimidine nucleotides present in the double-stranded siNA molecule comprises a sugar modification, and wherein the nucleotide sequence or a portion thereof of the antisense strand is complementary to a nucleotide sequence of the untranslated region or a portion thereof of the influenza target RNA.

[0070] In one embodiment, the invention features a double-stranded short interfering nucleic acid (siNA) molecule that inhibits expression of an influenza target gene, wherein one of the strands of the double-stranded siNA molecule is an antisense strand which comprises nucleotide sequence that is complementary to nucleotide sequence of influenza target RNA or a portion thereof, wherein the other strand is a sense strand which comprises nucleotide sequence that is complementary to a nucleotide sequence of the antisense strand, wherein a majority of the pyrimidine nucleotides present in the double-stranded siNA molecule comprises a sugar modification, and wherein the nucleotide sequence of the antisense strand is complementary to a nucleotide sequence of the influenza target RNA or a portion thereof that is present in the influenza target RNA.

[0071] In one embodiment, the invention features a composition comprising a siNA molecule of the invention in a pharmaceutically acceptable carrier or diluent.

[0072] In a non-limiting example, the introduction of chemically-modified nucleotides into nucleic acid molecules provides a powerful tool in overcoming potential limitations of in vivo stability and bioavailability inherent to native RNA molecules that are delivered exogenously. For example, the use of chemically-modified nucleic acid molecules can enable a lower dose of a particular nucleic acid molecule for a given therapeutic effect since chemically-modified nucleic acid molecules tend to have a longer half-life in serum. Furthermore, certain chemical modifications can improve the bioavailability of nucleic acid molecules by targeting particular cells or tissues and/or improving cellular uptake of the nucleic acid molecule. Therefore, even if the activity of a chemically-modified nucleic acid molecule is reduced as compared to a native nucleic acid molecule, for example, when compared to an all-RNA nucleic acid molecule, the overall activity of the modified nucleic acid molecule can be greater than that of the native molecule due to improved stability and/or delivery of the molecule. Unlike native unmodified siNA, chemically-modified siNA can also minimize the possibility of activating interferon activity or immunostimulation in humans.

[0073] In any of the embodiments of siNA molecules described herein, the antisense region of a siNA molecule of the invention can comprise a phosphorothioate internucleotide linkage at the 3′-end of said antisense region. In any of the embodiments of siNA molecules described herein, the antisense region can comprise about one to about five phosphorothioate internucleotide linkages at the 5′-end of said antisense region. In any of the embodiments of siNA molecules described herein, the 3′-terminal nucleotide overhangs of a siNA molecule of the invention can comprise ribonucleotides or deoxyribonucleotides that are chemically-modified at a nucleic acid sugar, base, or backbone. In any of the embodiments of siNA molecules described herein, the 3′-terminal nucleotide overhangs can comprise one or more universal base ribonucleotides. In any of the embodiments of siNA molecules described herein, the 3′-terminal nucleotide overhangs can comprise one or more acyclic nucleotides.

[0074] One embodiment of the invention provides an expression vector comprising a nucleic acid sequence encoding at least one siNA molecule of the invention in a manner that allows expression of the nucleic acid molecule. Another embodiment of the invention provides a mammalian cell comprising such an expression vector. The mammalian cell can be a human cell. The siNA molecule of the expression vector can comprise a sense region and an antisense region. The antisense region can comprise sequence complementary to a RNA or DNA sequence encoding an influenza target and the sense region can comprise sequence complementary to the antisense region. The siNA molecule can comprise two distinct strands having complementary sense and antisense regions. The siNA molecule can comprise a single strand having complementary sense and antisense regions.

[0075] In one embodiment, the invention features a chemically-modified short interfering nucleic acid (siNA) molecule capable of mediating RNA interference (RNAi) inside a cell or reconstituted in vitro system, wherein the chemical modification comprises one or more (e.g., about 1, 2, 3, 4, 5, 6, 7, 8, 9, 10, or more) nucleotides comprising a backbone modified intemucleotide linkage having Formula I:

[chemical structure]

[0076] wherein each R1 and R2 is independently any nucleotide, non-nucleotide, or polynucleotide which can be naturally-occurring or chemically-modified and which can be included in the structure of the siNA molecule or serve as a point of attachment to the siNA molecule, each X and Y is independently 0, S, N, alkyl, or substituted alkyl, each Z and W is independently 0, S, N, alkyl, substituted alkyl, O-alkyl, S-alkyl, alkaryl, aralkyl, or acetyl and wherein W, X, Y, and Z are optionally not all O. In another embodiment, a backbone modification of the invention comprises a phosphonoacetate and/or thiophosphonoacetate intemucleotide linkage (see for example Sheehan et al., 2003, Nucleic Acids Research, 31, 4109-4118).

[0077] The chemically-modified intemucleotide linkages having Formula I, for example, wherein any Z, W, X, and/or Y independently comprises a sulphur atom, can be present in one or both oligonucleotide strands of the siNA duplex, for example, in the sense strand, the antisense strand, or both strands. The siNA molecules of the invention can comprise one or more (e.g., about 1, 2, 3, 4, 5, 6, 7, 8, 9, 10, or more) chemically-modified intemucleotide linkages having Formula I at the 3′-end, the 5′-end, or both of the 3′ and 5′-ends of the sense strand, the antisense strand, or both strands. For example, an exemplary siNA molecule of the invention can comprise about 1 to about 5 or more (e.g., about 1, 2, 3, 4, 5, or more) chemically-modified internucleotide linkages having Formula I at the 5′-end of the sense strand, the antisense strand, or both strands. In another non-limiting example, an exemplary siNA molecule of the invention can comprise one or more (e.g., about 1, 2, 3, 4, 5, 6, 7, 8, 9, 10, or more) pyrimidine nucleotides with chemically-modified internucleotide linkages having Formula I in the sense strand, the antisense strand, or both strands. In yet another non-limiting example, an exemplary siNA molecule of the invention can comprise one or more (e.g., about 1, 2, 3, 4, 5, 6, 7, 8, 9, 10, or more) purine nucleotides with chemically-modified internucleotide linkages having Formula I in the sense strand, the antisense strand, or both strands. In another embodiment, a siNA molecule of the invention having internucleotide linkage(s) of Formula I also comprises a chemically-modified nucleotide or non-nucleotide having any of Formulae I-VII.

[0078] In one embodiment, the invention features a chemically-modified short interfering nucleic acid (siNA) molecule capable of mediating RNA interference (RNAi) inside a cell or reconstituted in vitro system, wherein the chemical modification comprises one or more (e.g., about 1, 2, 3, 4, 5, 6, 7, 8, 9, 10, or more) nucleotides or non-nucleotides having Formula II: [chemical structure]
wherein each R3, R4, R5, R6, R7, R8, R10, R11 and R12 is independently H, OH, alkyl, substituted alkyl, alkaryl or aralkyl, F, Cl, Br, CN, CF3, OCF3, OCN, O-alkyl, S-alkyl, N-alkyl, O-alkenyl, S-alkenyl, N-alkenyl, SO-alkyl, alkyl-OSH, alkyl-OH, O-alkyl-OH, O-alkyl-SH, S-alkyl-OH, S-alkyl-SH, alkyl-S-alkyl, alkyl-O-alkyl, ONO2, NO2, N3, NH2, aminoalkyl, aminoacid, aminoacyl, ONH2, O-aminoalkyl, O-aminoacid, O-aminoacyl, heterocycloalkyl, heterocycloalkaryl, aminoalkylamino, polyalklylamino, substituted silyl, or a group having any of Formula I, II, III, IV, V, VI and/or VII, any of which can be included in the structure of the siNA molecule or serve as a point of attachment to the siNA molecule; R9 is O, S, CH2, S=O, CHF, or CF2, and B is a nucleosidic base such as adenine, guanine, uracil, cytosine, thymine, 2-aminoadenosine, 5-methylcytosine, 2,6-diaminopurine, or any other non-naturally occurring base that can be complementary or non-complementary to target RNA or a non-nucleosidic base such as phenyl, naphthyl, 3-nitropyrrole, 5-nitroindole, nebularine, pyridone, pyridinone, or any other non-naturally occurring universal base that can be complementary or non-complementary to target RNA. In one embodiment, R3 and/or R7 comprises a conjugate moiety and a linker (e.g., a nucleotide or non-nucleotide linker as described herein or otherwise known in the art). Non-limiting examples of conjugate moieties include ligands for cellular receptors, such as peptides derived from naturally occurring protein ligands; protein localization sequences, including cellular ZIP code sequences; antibodies; nucleic acid aptamers; vitamins and other co-factors, such as folate and N-acetylgalactosamine; polymers, such as polyethyleneglycol (PEG); phospholipids; cholesterol; steroids, and polyamines, such as PEI, spermine or spermidine.

[0079] The chemically-modified nucleotide or non-nucleotide of Formula II can be present in one or both oligonucleotide strands of the siNA duplex, for example in the sense strand, the antisense strand, or both strands. The siNA molecules of the invention can comprise one or more chemically-modified nucleotides or non-nucleotides of Formula II at the 3′-end, the 5′-end, or both of the 3′ and 5′-ends of the sense strand, the antisense strand, or both strands. For example, an exemplary siNA molecule of the invention can comprise about 1 to about 5 or more (e.g., about 1, 2, 3, 4, 5, or more) chemically-modified nucleotides or non-nucleotides of Formula II at the 5′-end of the sense strand, the antisense strand, or both strands. In anther non-limiting example, an exemplary siNA molecule of the invention can comprise about 1 to about 5 or more (e.g., about 1, 2, 3, 4, 5, or more) chemically-modified nucleotides or non-nucleotides of Formula II at the 3′-end of the sense strand, the antisense strand, or both strands.

[0080] In one embodiment, the invention features a chemically-modified short interfering nucleic acid (siNA) molecule capable of mediating RNA interference (RNAi) inside a cell or reconstituted in vitro system, wherein the chemical modification comprises one or more (e.g., about 1, 2, 3, 4, 5, 6, 7, 8, 9, 10, or more) nucleotides or non-nucleotides having Formula III: [chemical structure]
wherein each R3, R4, R5, R6, R7, R8, R10, R11 and R12 is independently H, OH, alkyl, substituted alkyl, alkaryl or aralkyl, F, Cl, Br, CN, CF3, OCF3, OCN, O-alkyl, S-alkyl, N-alkyl, O-alkenyl, S-alkenyl, N-alkenyl, SO-alkyl, alkyl-OSH, alkyl-OH, O-alkyl-OH, O-alkyl-SH, S-alkyl-OH, S-alkyl-SH, alkyl-S-alkyl, alkyl-O-alkyl, ONO2, N02, N3, NH2, aminoalkyl, aminoacid, aminoacyl, ONH2, O-aminoalkyl, O-aminoacid, O-aminoacyl, heterocycloalkyl, heterocycloalkaryl, aminoalkylamino, polyalklylamino, substituted silyl, or a group having any of Formula I, II, III, IV, V, VI and/or VII, any of which can be included in the structure of the siNA molecule or serve as a point of attachment to the siNA molecule; R9 is O, S, CH2, S=O, CHF, or CF2, and B is a nucleosidic base such as adenine, guanine, uracil, cytosine, thymine, 2-aminoadenosine, 5-methylcytosine, 2,6-diaminopurine, or any other non-naturally occurring base that can be employed to be complementary or non-complementary to target RNA or a non-nucleosidic base such as phenyl, naphthyl, 3-nitropyrrole, 5-nitroindole, nebularine, pyridone, pyridinone, or any other non-naturally occurring universal base that can be complementary or non-complementary to target RNA. In one embodiment, R3 and/or R7 comprises a conjugate moiety and a linker (e.g., a nucleotide or non-nucleotide linker as described herein or otherwise known in the art). Non-limiting examples of conjugate moieties include ligands for cellular receptors, such as peptides derived from naturally occurring protein ligands; protein localization sequences, including cellular ZIP code sequences; antibodies; nucleic acid aptamers; vitamins and other co-factors, such as folate and N-acetylgalactosamine; polymers, such as polyethyleneglycol (PEG); phospholipids; cholesterol; steroids, and polyamines, such as PEI, spermine or spermidine.

[0081] The chemically-modified nucleotide or non-nucleotide of Formula III can be present in one or both oligonucleotide strands of the siNA duplex, for example, in the sense strand, the antisense strand, or both strands. The siNA molecules of the invention can comprise one or more chemically-modified nucleotides or non-nucleotides of Formula III at the 3′-end, the 5′-end, or both of the 3′ and 5′-ends of the sense strand, the antisense strand, or both strands. For example, an exemplary siNA molecule of the invention can comprise about 1 to about 5 or more (e.g., about 1, 2, 3, 4, 5, or more) chemically-modified nucleotide(s) or non-nucleotide(s) of Formula III at the 5′-end of the sense strand, the antisense strand, or both strands. In anther non-limiting example, an exemplary siNA molecule of the invention can comprise about 1 to about 5 or more (e.g., about 1, 2, 3, 4, 5, or more) chemically-modified nucleotide or non-nucleotide of Formula III at the 3′-end of the sense strand, the antisense strand, or both strands.

[0082] In another embodiment, a siNA molecule of the invention comprises a nucleotide having Formula II or III, wherein the nucleotide having Formula II or III is in an inverted configuration. For example, the nucleotide having Formula II or III is connected to the siNA construct in a 3′-3′, 3′-2′, 2′-3′, or 5′-5′ configuration, such as at the 3′-end, the 5′-end, or both of the 3′ and 5′-ends of one or both siNA strands. 100781 In one embodiment, the invention features a chemically-modified short interfering nucleic acid (siNA) molecule capable of mediating RNA interference (RNAi) inside a cell or reconstituted in vitro system, wherein the chemical modification comprises a 5′-terminal phosphate group having Formula IV: [chemical structure]
wherein each X and Y is independently O, S, N, alkyl, substituted alkyl, or alkylhalo; wherein each Z and W is independently O, S, N, alkyl, substituted alkyl, O-alkyl, S-alkyl, alkaryl, aralkyl, alkylhalo, or acetyl; and wherein W, X, Y and Z are optionally not all O and Y serves as a point of attachment to the siNA molecule.

[0083] In one embodiment, the invention features a siNA molecule having a 5′-terminal phosphate group having Formula IV on the target-complementary strand, for example, a strand complementary to a target RNA, wherein the siNA molecule comprises an all RNA siNA molecule. In another embodiment, the invention features a siNA molecule having a 5′-terminal phosphate group having Formula IV on the target-complementary strand wherein the siNA molecule also comprises about 1 to about 3 (e.g., about 1, 2, or 3) nucleotide 3′-terminal nucleotide overhangs having about 1 to about 4 (e.g., about 1, 2, 3, or 4) deoxyribonucleotides on the 3′-end of one or both strands. In another embodiment, a 5′-terminal phosphate group having Formula IV is present on the target-complementary strand of a siNA molecule of the invention, for example a siNA molecule having chemical modifications having any of Formulae I-VII.

[0084] In one embodiment, the invention features a chemically-modified short interfering nucleic acid (siNA) molecule capable of mediating RNA interference (RNAi) inside a cell or reconstituted in vitro system, wherein the chemical modification comprises one or more phosphorothioate intemucleotide linkages. For example, in a non-limiting example, the invention features a chemically-modified short interfering nucleic acid (siNA) having about 1, 2, 3, 4, 5, 6, 7, 8 or more phosphorothioate internucleotide linkages in one siNA strand. In yet another embodiment, the invention features a chemically-modified short interfering nucleic acid (siNA) individually having about 1, 2, 3, 4, 5, 6, 7, 8 or more phosphorothioate internucleotide linkages in both siNA strands. The phosphorothioate internucleotide linkages can be present in one or both oligonucleotide strands of the siNA duplex, for example in the sense strand, the antisense strand, or both strands. The siNA molecules of the invention can comprise one or more phosphorothioate internucleotide linkages at the 3′-end, the 5′-end, or both of the 3′- and 5′-ends of the sense strand, the antisense strand, or both strands. For example, an exemplary siNA molecule of the invention can comprise about 1 to about 5 or more (e.g., about 1, 2, 3, 4, 5, or more) consecutive phosphorothioate intemucleotide linkages at the 5′-end of the sense strand, the antisense strand, or both strands. In another non-limiting example, an exemplary siNA molecule of the invention can comprise one or more (e.g., about 1, 2, 3, 4, 5, 6, 7, 8, 9, 10, or more) pyrimidine phosphorothioate internucleotide linkages in the sense strand, the antisense strand, or both strands. In yet another non-limiting example, an exemplary siNA molecule of the invention can comprise one or more (e.g., about 1, 2, 3, 4, 5, 6, 7, 8, 9, 10, or more) purine phosphorothioate internucleotide linkages in the sense strand, the antisense strand, or both strands.

[0085] Each strand of the double stranded siNA molecule can have one or more chemical modifications such that each strand comprises a different pattern of chemical modifications. Several non-limiting examples of modification schemes that could give rise to different patterns of modifications are provided herein.

[0086] In one embodiment, the invention features a siNA molecule, wherein the sense strand comprises one or more, for example, about 1, 2, 3, 4, 5, 6, 7, 8, 9, 10, or more phosphorothioate internucleotide linkages, and/or one or more (e.g., about 1, 2, 3, 4, 5, 6, 7, 8, 9, 10 or more) 2′-deoxy, 2′-O-methyl, 2′-deoxy-2′-fluoro, 2′-O-trifluoromethyl, 2′-O-ethyl-trifluoromethoxy, 2′-O-difluoromethoxy-ethoxy and/or about one or more (e.g., about 1, 2, 3, 4, 5, 6, 7, 8, 9, 10 or more) universal base modified nucleotides, and optionally a terminal cap molecule at the 3′-end, the 5′-end, or both of the 3′- and 5′-ends of the sense strand; and wherein the antisense strand comprises about 1 to about 10 or more, specifically about 1, 2, 3, 4, 5, 6, 7, 8, 9, 10, or more phosphorothioate internucleotide linkages, and/or one or more (e.g., about 1, 2, 3, 4, 5, 6, 7, 8, 9, 10 or more) 2′-deoxy, 2′-O-methyl, 2′-deoxy-2′-fluoro, 2′-O-trifluoromethyl, 2′-O-ethyl-trifluoromethoxy, 2′-O-difluoromethoxy-ethoxy, 4′-thio and/or one or more (e.g., about 1, 2, 3, 4, 5, 6, 7, 8, 9, 10 or more) universal base modified nucleotides, and optionally a terminal cap molecule at the 3′-end, the 5′-end, or both of the 3′-and 5′-ends of the antisense strand. In another embodiment, one or more, for example about 1, 2, 3, 4, 5, 6, 7, 8, 9, 10, or more, pyrimidine nucleotides of the sense and/or antisense siNA strand are chemically-modified with 2′-deoxy, 2′-O-methyl, 2′-O-trifluoromethyl, 2′-O-ethyl-trifluoromethoxy, 2′-O-difluoromethoxy-ethoxy, 4′-thio and/or 2′-deoxy-2′-fluoro nucleotides, with or without one or more, for example about 1, 2, 3, 4, 5, 6, 7, 8, 9, 10, or more, phosphorothioate intemucleotide linkages and/or a terminal cap molecule at the 3′-end, the 5′-end, or both of the 3′- and 5′-ends, being present in the same or different strand.

[0087] In another embodiment, the invention features a siNA molecule, wherein the sense strand comprises about 1 to about 5, specifically about 1, 2, 3, 4, or 5 phosphorothioate intemucleotide linkages, and/or one or more (e.g., about 1, 2, 3, 4, 5, or more) 2′-deoxy, 2′-O-methyl, 2′-deoxy-2′-fluoro, 2′-O-trifluoromethyl, 2′-O-ethyl-trifluoromethoxy, 2′-O-difluoromethoxy-ethoxy, 4′-thio and/or one or more (e.g., about 1, 2, 3, 4, 5, or more) universal base modified nucleotides, and optionally a terminal cap molecule at the 3-end, the 5′-end, or both of the 3′- and 5′-ends of the sense strand; and wherein the antisense strand comprises about 1 to about 5 or more, specifically about 1, 2, 3, 4, 5, or more phosphorothioate intemucleotide linkages, and/or one or more (e.g., about 1, 2, 3, 4, 5, 6, 7, 8, 9, 10 or more) 2′-deoxy, 2′-O-methyl, 2′-deoxy-2′-fluoro, 2′-O-trifluoromethyl, 2′-O-ethyl-trifluoromethoxy, 2′-O-difluoromethoxy-ethoxy, 4′-thio and/or one or more (e.g., about 1, 2, 3, 4, 5, 6, 7, 8, 9, 10 or more) universal base modified nucleotides, and optionally a terminal cap molecule at the 3′-end, the 5′-end, or both of the 3′- and 5′-ends of the antisense strand. In another embodiment, one or more, for example about 1, 2, 3, 4, 5, 6, 7, 8, 9, 10, or more, pyrimidine nucleotides of the sense and/or antisense siNA strand are chemically-modified with 2′-deoxy, 2′-O-methyl, 2′-O-trifluoromethyl, 2′-O-ethyl-trifluoromethoxy, 2′-O-difluoromethoxy-ethoxy, 4′-thio and/or 2′-deoxy-2′-fluoro nucleotides, with or without about 1 to about 5 or more, for example about 1, 2, 3, 4, 5, or more phosphorothioate intemucleotide linkages and/or a terminal cap molecule at the 3′-end, the 5′-end, or both of the 3′- and 5′-ends, being present in the same or different strand.

[0088] In one embodiment, the invention features a siNA molecule, wherein the antisense strand comprises one or more, for example, about 1, 2, 3, 4, 5, 6, 7, 8, 9, 10, or more phosphorothioate internucleotide linkages, and/or about one or more (e.g., about 1, 2, 3, 4, 5, 6, 7, 8, 9, 10 or more) 2′-deoxy, 2′-O-methyl, 2′-deoxy-2′-fluoro, 2′-O-trifluoromethyl, 2′-O-ethyl-trifluoromet 2′-O-difluoromethoxy-ethoxy, 4′-thio and/or one or more (e.g., about 1, 2, 3, 4, 5, 6, 7, 8, 9, 10 or more) universal base modified nucleotides, and optionally a terminal cap molecule at the 3′-end, the 5′-end, or both of the 3′- and 5′-ends of the sense strand; and wherein the antisense strand comprises about 1 to about 10 or more, specifically about 1, 2, 3, 4, 5, 6, 7, 8, 9, 10 or more phosphorothioate intemucleotide linkages, and/or one or more (e.g., about 1, 2, 3, 4, 5, 6, 7, 8, 9, 10 or more) 2′-deoxy, 2′-O-methyl, 2′-deoxy-2′-fluoro, 2′-O-trifluoromethyl, 2′-O-ethyl-trifluoromethoxy, 2′-O-difluoromethoxy-ethoxy, 4′-thio and/or one or more (e.g., about 1, 2, 3, 4, 5, 6, 7, 8, 9, 10 or more) universal base modified nucleotides, and optionally a terminal cap molecule at the 3′-end, the 5′-end, or both of the 3′- and 5′-ends of the antisense strand. In another embodiment, one or more, for example about 1, 2, 3, 4, 5, 6, 7, 8, 9, 10 or more pyrimidine nucleotides of the sense and/or antisense siNA strand are chemically-modified with 2′-deoxy, 2′-O-methyl, 2′-O-trifluoromethyl, 2′-O-ethyl-trifluoromethoxy, 2′-O-difluoromethoxy-ethoxy, 4′-thio and/or 2′-deoxy-2′-fluoro nucleotides, with or without one or more, for example, about 1, 2, 3, 4, 5, 6, 7, 8, 9, 10 or more phosphorothioate intemucleotide linkages and/or a terminal cap molecule at the 3′-end, the 5′-end, or both of the 3′ and 5′-ends, being present in the same or different strand.

[0089] In another embodiment, the invention features a siNA molecule, wherein the antisense strand comprises about 1 to about 5 or more, specifically about 1, 2, 3, 4, 5 or more phosphorothioate intemucleotide linkages, and/or one or more (e.g., about 1, 2, 3, 4, 5, 6, 7, 8, 9, 10 or more) 2′-deoxy, 2′-O-methyl, 2′-deoxy-2′-fluoro, 2′-O-trifluoromethyl, 2′-O-ethyl-trifluoromethoxy, 2′-O-difluoromethoxy-ethoxy, 4′-thio and/or one or more (e.g., about 1, 2, 3, 4, 5, 6, 7, 8, 9, 10 or more) universal base modified nucleotides, and optionally a terminal cap molecule at the 3′-end, the 5′-end, or both of the 3′- and 5′-ends of the sense strand; and wherein the antisense strand comprises about 1 to about 5 or more, specifically about 1, 2, 3, 4, 5 or more phosphorothioate intemucleotide linkages, and/or one or more (e.g., about 1, 2, 3, 4, 5, 6, 7, 8, 9, 10 or more) 2′-deoxy, 2′-O-methyl, 2′-deoxy-2′-fluoro, 2′-O-trifluoromethyl, 2′-O-ethyl-trifluoromethoxy, 2′-O-difluoromethoxy-ethoxy, 4′-thio and/or one or more (e.g., about 1, 2, 3, 4, 5, 6, 7, 8, 9, 10 or more) universal base modified nucleotides, and optionally a terminal cap molecule at the 3′-end, the 5′-end, or both of the 3′- and 5′-ends of the antisense strand. In another embodiment, one or more, for example about 1, 2, 3, 4, 5, 6, 7, 8, 9, 10 or more pyrimidine nucleotides of the sense and/or antisense siNA strand are chemically-modified with 2′-deoxy, 2′-O-methyl, 2′-O-trifluoromethyl, 2′-O-ethyl-trifluoromethoxy, 2′-O-difluoromethoxy-ethoxy, 4′-thio and/or 2′-deoxy-2′-fluoro nucleotides, with or without about 1 to about 5, for example about 1, 2, 3, 4, 5 or more phosphorothioate intemucleotide linkages and/or a terminal cap molecule at the 3′-end, the 5′-end, or both of the 3′- and 5′-ends, being present in the same or different strand.

[0090] In one embodiment, the invention features a chemically-modified short interfering nucleic acid (siNA) molecule having about 1 to about 5 or more (specifically about 1, 2, 3, 4, 5 or more) phosphorothioate intemucleotide linkages in each strand of the siNA molecule.

[0091] In another embodiment, the invention features a siNA molecule comprising 2′-5′ intemucleotide linkages. The 2′-5′ intemucleotide linkage(s) can be at the 3′-end, the 5′-end, or both of the 3′- and 5′-ends of one or both siNA sequence strands. In addition, the 2′-5′ intemucleotide linkage(s) can be present at various other positions within one or both siNA sequence strands, for example, about 1, 2, 3, 4, 5, 6, 7, 8, 9, 10, or more including every intemucleotide linkage of a pyrimidine nucleotide in one or both strands of the siNA molecule can comprise a 2′-5′ internucleotide linkage, or about 1, 2, 3, 4, 5, 6, 7, 8, 9, 10, or more including every internucleotide linkage of a purine nucleotide in one or both strands of the siNA molecule can comprise a 2′-5′ internucleotide linkage.

[0092] In another embodiment, a chemically-modified siNA molecule of the invention comprises a duplex having two strands, one or both of which can be chemically-modified, wherein each strand is independently about 15 to about 30 (e.g., about 15, 16, 17, 18, 19, 20, 21, 22, 23, 24, 25, 26, 27, 28, 29, or 30) nucleotides in length, wherein the duplex has about 15 to about 30 (e.g., about 15, 16, 17, 18, 19, 20, 21, 22, 23, 24, 25, 26, 27, 28, 29, or 30) base pairs, and wherein the chemical modification comprises a structure having any of Formulae I-VII. For example, an exemplary chemically-modified siNA molecule of the invention comprises a duplex having two strands, one or both of which can be chemically-modified with a chemical modification having any of Formulae I-VII or any combination thereof, wherein each strand consists of about 21 nucleotides, each having a 2-nucleotide 3′-terminal nucleotide overhang, and wherein the duplex has about 19 base pairs. In another embodiment, a siNA molecule of the invention comprises a single stranded hairpin structure, wherein the siNA is about 36 to about 70 (e.g., about 36, 40, 45, 50, 55, 60, 65, or 70) nucleotides in length having about 15 to about 30 (e.g., about 15, 16, 17, 18, 19, 20, 21, 22, 23, 24, 25, 26, 27, 28, 29, or 30) base pairs, and wherein the siNA can include a chemical modification comprising a structure having any of Formulae I-VII or any combination thereof. For example, an exemplary chemically-modified siNA molecule of the invention comprises a linear oligonucleotide having about 42 to about 50 (e.g., about 42, 43, 44, 45, 46, 47, 48, 49, or 50) nucleotides that is chemically-modified with a chemical modification having any of Formulae I-VII or any combination thereof, wherein the linear oligonucleotide forms a hairpin structure having about 19 to about 21 (e.g., 19, 20, or 21) base pairs and a 2-nucleotide 3′-terminal nucleotide overhang. In another embodiment, a linear hairpin siNA molecule of the invention contains a stem loop motif, wherein the loop portion of the siNA molecule is biodegradable. For example, a linear hairpin siNA molecule of the invention is designed such that degradation of the loop portion of the siNA molecule in vivo can generate a double-stranded siNA molecule with 3′-terminal overhangs, such as 3′-terminal nucleotide overhangs comprising about 2 nucleotides.

[0093] In another embodiment, a siNA molecule of the invention comprises a hairpin structure, wherein the siNA is about 25 to about 50 (e.g., about 25, 26, 27, 28, 29, 30, 31, 32, 33, 34, 35, 36, 37, 38, 39, 40, 41, 42, 43, 44, 45, 46, 47, 48, 49, or 50) nucleotides in length having about 3 to about 25 (e.g., about 3, 4, 5, 6, 7, 8, 9, 10, 11, 12, 13, 14, 15, 16, 17, 18, 19, 20, 21, 22, 23, 24, or 25) base pairs, and wherein the siNA can include one or more chemical modifications comprising a structure having any of Formulae I-VII or any combination thereof. For example, an exemplary chemically-modified siNA molecule of the invention comprises a linear oligonucleotide having about 25 to about 35 (e.g., about 25, 26, 27, 28, 29, 30, 31, 32, 33, 34, or 35) nucleotides that is chemically-modified with one or more chemical modifications having any of Formulae I-VII or any combination thereof, wherein the linear oligonucleotide forms a hairpin structure having about 3 to about 25 (e.g., about 3, 4, 5, 6, 7, 8, 9, 10, 11, 12, 13, 14, 15, 16, 17, 18, 19, 20, 21, 22, 23, 24, or 25) base pairs and a 5′-terminal phosphate group that can be chemically modified as described herein (for example a 5′-terminal phosphate group having Formula IV). In another embodiment, a linear hairpin siNA molecule of the invention contains a stem loop motif, wherein the loop portion of the siNA molecule is biodegradable. In one embodiment, a linear hairpin siNA molecule of the invention comprises a loop portion comprising a non-nucleotide linker.

[0094] In another embodiment, a siNA molecule of the invention comprises an asymmetric hairpin structure, wherein the siNA is about 25 to about 50 (e.g., about 25, 26, 27, 28, 29, 30, 31, 32, 33, 34, 35, 36, 37, 38, 39, 40, 41, 42, 43, 44, 45, 46, 47, 48, 49, or 50) nucleotides in length having about 3 to about 25 (e.g., about 3, 4, 5, 6, 7, 8, 9, 10, 11, 12, 13, 14, 15, 16, 17, 18, 19, 20, 21, 22, 23, 24, or 25) base pairs, and wherein the siNA can include one or more chemical modifications comprising a structure having any of Formulae I-VII or any combination thereof. For example, an exemplary chemically-modified siNA molecule of the invention comprises a linear oligonucleotide having about 25 to about 35 (e.g., about 25, 26, 27, 28, 29, 30, 31, 32, 33, 34, or 35) nucleotides that is chemically-modified with one or more chemical modifications having any of Formulae I-VII or any combination thereof, wherein the linear oligonucleotide forms an asymmetric hairpin structure having about 3 to about 25 (e.g., about 3, 4, 5, 6, 7, 8, 9, 10, 11, 12, 13, 14, 15, 16, 17, 18, 19, 20, 21, 22, 23, 24, or 25) base pairs and a 5′-terminal phosphate group that can be chemically modified as described herein (for example a 5′-terminal phosphate group having Formula IV). In one embodiment, an asymmetric hairpin siNA molecule of the invention contains a stem loop motif, wherein the loop portion of the siNA molecule is biodegradable. In another embodiment, an asymmetric hairpin siNA molecule of the invention comprises a loop portion comprising a non-nucleotide linker.

[0095] In another embodiment, a siNA molecule of the invention comprises an asymmetric double stranded structure having separate polynucleotide strands comprising sense and antisense regions, wherein the antisense region is about 15 to about 30 (e.g., about 15, 16, 17, 18, 19, 20, 21, 22, 23, 24, 25, 26, 27, 28, 29, or 30) nucleotides in length, wherein the sense region is about 3 to about 25 (e.g., about 3, 4, 5, 6, 7, 8, 9, 10, 11, 12, 13, 14, 15, 16, 17, 18, 19, 20, 21, 22, 23, 24, or 25) nucleotides in length, wherein the sense region and the antisense region have at least 3 complementary nucleotides, and wherein the siNA can include one or more chemical modifications comprising a structure having any of Formulae I-VII or any combination thereof. For example, an exemplary chemically-modified siNA molecule of the invention comprises an asymmetric double stranded structure having separate polynucleotide strands comprising sense and antisense regions, wherein the antisense region is about 18 to about 23 (e.g., about 18, 19, 20, 21, 22, or 23) nucleotides in length and wherein the sense region is about 3 to about 15 (e.g., about 3, 4, 5, 6, 7, 8, 9, 10, 11, 12, 13, 14, or 15) nucleotides in length, wherein the sense region the antisense region have at least 3 complementary nucleotides, and wherein the siNA can include one or more chemical modifications comprising a structure having any of Formulae I-VII or any combination thereof. In another embodiment, the asymmetric double stranded siNA molecule can also have a 5′-terminal phosphate group that can be chemically modified as described herein (for example a 5′-terminal phosphate group having Formula IV).

[0096] In another embodiment, a siNA molecule of the invention comprises a circular nucleic acid molecule, wherein the siNA is about 38 to about 70 (e.g., about 38, 40, 45, 50, 55, 60, 65, or 70) nucleotides in length having about 15 to about 30 (e.g., about 15, 16, 17, 18, 19, 20, 21, 22, 23, 24, 25, 26, 27, 28, 29, or 30) base pairs, and wherein the siNA can include a chemical modification, which comprises a structure having any of Formulae I-VII or any combination thereof. For example, an exemplary chemically-modified siNA molecule of the invention comprises a circular oligonucleotide having about 42 to about 50 (e.g., about 42, 43, 44, 45, 46, 47, 48, 49, or 50) nucleotides that is chemically-modified with a chemical modification having any of Formulae I-VII or any combination thereof, wherein the circular oligonucleotide forms a dumbbell shaped structure having about 19 base pairs and 2 loops.

[0097] In another embodiment, a circular siNA molecule of. the invention contains two loop motifs, wherein one or both loop portions of the siNA molecule is biodegradable. For example, a circular siNA molecule of the invention is designed such that degradation of the loop portions of the siNA molecule in vivo can generate a double-stranded siNA molecule with 3′-terminal overhangs, such as 3′-terminal nucleotide overhangs comprising about 2 nucleotides.

[0098] In one embodiment, a siNA molecule of the invention comprises at least one (e.g., about 1, 2, 3, 4, 5, 6, 7, 8, 9, 10, or more) abasic moiety, for example a compound having Formula V: [chemical structure]
wherein each R3, R4, R5, R6, R7, R8, R10, R11, R12, and R13 is independently H, OH, alkyl, substituted alkyl, alkaryl or aralkyl, F, Cl, Br, CN, CF3, OCF3, OCN, O-alkyl, S-alkyl, N-alkyl, O-alkenyl, S-alkenyl, N-alkenyl, SO-alkyl, alkyl-OSH, alkyl-OH, O-alkyl-OH, O-alkyl-SH, S-alkyl-OH, S-alkyl-SH, alkyl-S-alkyl, alkyl-O-alkyl, ONO2, N02, N3, NH2, aminoalkyl, aminoacid, aminoacyl, ONH2, O-aminoalkyl, O-aminoacid, O-aminoacyl, heterocycloalkyl, heterocycloalkaryl, aminoalkylamino, polyalklylamino, substituted silyl, or a group having any of Formula I, II, III, IV, V, VI and/or VII, any of which can be included in the structure of the siNA molecule or serve as a point of attachment to the siNA molecule; R9 is O, S, CH2, S=O, CHF, or CF2. In one embodiment, R3 and/or R7 comprises a conjugate moiety and a linker (e.g., a nucleotide or non-nucleotide linker as described herein or otherwise known in the art). Non-limiting examples of conjugate moieties include ligands for cellular receptors, such as peptides derived from naturally occurring protein ligands; protein localization sequences, including cellular ZIP code sequences; antibodies; nucleic acid aptamers; vitamins and other co-factors, such as folate and N-acetylgalactosamine; polymers, such as polyethyleneglycol (PEG); phospholipids; cholesterol; steroids, and polyamines, such as PEI, spermine or spermidine.

[0099] In one embodiment, a siNA molecule of the invention comprises at least one (e.g., about 1, 2, 3, 4, 5, 6, 7, 8, 9, 10, or more) inverted abasic moiety, for example a compound having Formula VI: [chemical structure]
wherein each R3, R4, R5, R6, R7, R8, R10, R11, R12, and R13 is independently H, OH, alkyl, substituted alkyl, alkaryl or aralkyl, F, Cl, Br, CN, CF3, OCF3, OCN, O-alkyl, S-alkyl, N-alkyl, O-alkenyl, S-alkenyl, N-alkenyl, SO-alkyl, alkyl-OSH, alkyl-OH, O-alkyl-OH, O-alkyl-SH, S-alkyl-OH, S-alkyl-SH, alkyl-S-alkyl, alkyl-O-alkyl, ONO2, NO2, N3, NH2, aminoalkyl, aminoacid, aminoacyl, ONH2, O-aminoalkyl, O-aminoacid, O-aminoacyl, heterocycloalkyl, heterocycloalkaryl, aminoalkylamino, polyalklylamino, substituted silyl, or a group having any of Formula I, II, III, IV, V, VI and/or VII, any of which can be included in the structure of the siNA molecule or serve as a point of attachment to the siNA molecule; R9 is O, S, CH2, S=O, CHF, or CF2, and either R2, R3, R8 or R13 serve as points of attachment to the siNA molecule of the invention. In one embodiment, R3 and/or R7 comprises a conjugate moiety and a linker (e.g., a nucleotide or non-nucleotide linker as described herein or otherwise known in the art). Non-limiting examples of conjugate moieties include ligands for cellular receptors, such as peptides derived from naturally occurring protein ligands; protein localization sequences, including cellular ZIP code sequences; antibodies; nucleic acid aptamers; vitamins and other co-factors, such as folate and N-acetylgalactosamine; polymers, such as polyethyleneglycol (PEG); phospholipids; cholesterol; steroids, and polyamines, such as PEI, spermine or spermidine.

[0100] In another embodiment, a siNA molecule of the invention comprises at least one (e.g., about 1, 2, 3, 4, 5, 6, 7, 8, 9, 10, or more) substituted polyalkyl moieties, for example a compound having Formula VII: [chemical structure]
wherein each n is independently an integer from 1 to 12, each Ri, R2 and R3 is independently H, OH, alkyl, substituted alkyl, alkaryl or aralkyl, F, Cl, Br, CN, CF3, OCF3, OCN, O-alkyl, S-alkyl, N-alkyl, O-alkenyl, S-alkenyl, N-alkenyl, SO-alkyl, alkyl-OSH, alkyl-OH, O-alkyl-OH, O-alkyl-SH, S-alkyl-OH, S-alkyl-SH, alkyl-S-alkyl, alkyl-O-alkyl, ONO2, NO2, N3, NH2, aminoalkyl, aminoacid, aminoacyl, ONH2, O-aminoalkyl, O-aminoacid, O-aminoacyl, heterocycloalkyl, heterocycloalkaryl, aminoalkylamino, polyalklylamino, substituted silyl, or a group having any of Formula I, II, III, IV, V, VI and/or VII, any of which can be included in the structure of the siNA molecule or serve as a point of attachment to the siNA molecule. In one embodiment, R3 and/or RI comprises a conjugate moiety and a linker (e.g., a nucleotide or non-nucleotide linker as described herein or otherwise known in the art). Non-limiting examples of conjugate moieties include ligands for cellular receptors, such as peptides derived from naturally occurring protein ligands; protein localization sequences, including cellular ZIP code sequences; antibodies; nucleic acid aptamers; vitamins and other co-factors, such as folate and N-acetylgalactosamine; polymers, such as polyethyleneglycol (PEG); phospholipids; cholesterol; steroids, and polyamines, such as PEI, spermine or spermidine.

[0101] By “ZIP code” sequences is meant, any peptide or protein sequence that is involved in cellular topogenic signaling mediated transport (see for example Ray et al., 2004, Science, 306(1501): 1505)

[0102] Each nucleotide within the double stranded siNA molecule can independently have a chemical modification comprising the structure of any of Formulae I-VIII. Thus, in one embodiment, one or more nucleotide positions of a siNA molecule of the invention comprises a chemical modification having structure of any of Formulae I-VII or any other modification herein. In one embodiment, each nucleotide position of a siNA molecule of the invention comprises a chemical modification having structure of any of Formulae I-VII or any other modification herein.

[0103] In one embodiment, one or more nucleotide positions of one or both strands of a double stranded siNA molecule of the invention comprises a chemical modification having structure of any of Formulae 1-VII or any other modification herein. In one embodiment, each nucleotide position of one or both strands of a double stranded siNA molecule of the invention comprises a chemical modification having structure of any of Formulae I-VII or any other modification herein.

[0104] In another embodiment, the invention features a compound having Formula VII, wherein R1 and R2 are hydroxyl (OH) groups, n=1, and R3 comprises O and is the point of attachment to the 3′-end, the 5′-end, or both of the 3′ and 5′-ends of one or both strands of a double-stranded siNA molecule of the invention or to a single-stranded siNA molecule of the invention. This modification is referred to herein as “glyceryl” (for example modification 6 in FIG. 10).

[0105] In another embodiment, a chemically modified nucleoside or non-nucleoside (e.g. a moiety having any of Formula V, VI or VII) of the invention is at the 3′-end, the 5′-end, or both of the 3′ and 5′-ends of a siNA molecule of the invention. For example, chemically modified nucleoside or non-nucleoside (e.g., a moiety having Formula V, VI or VII) can be present at the 3′-end, the 5′-end, or both of the 3′ and 5′-ends of the antisense strand, the sense strand, or both antisense and sense strands of the siNA molecule. In one embodiment, the chemically modified nucleoside or non-nucleoside (e.g., a moiety having Formula V, VI or VII) is present at the 5′-end and 3′-end of the sense strand and the 3′-end of the antisense strand of a double stranded siNA molecule of the invention. In one embodiment, the chemically modified nucleoside or non-nucleoside (e.g., a moiety having Formula V, VI or VII) is present at the terminal position of the 5′-end and 3′-end of the sense strand and the 3′-end of the antisense strand of a double stranded siNA molecule of the invention. In one embodiment, the chemically modified nucleoside or non-nucleoside (e.g., a moiety having Formula V, VI or VII) is present at the two terminal positions of the 5 ′-end and 3 ′-end of the sense strand and the 3′-end of the antisense strand of a double stranded siNA molecule of the invention. In one embodiment, the chemically modified nucleoside or non-nucleoside (e.g., a moiety having Formula V, VI or VII) is present at the penultimate position of the 5′-end and 3′-end of the sense strand and the 3′-end of the antisense strand of a double stranded siNA molecule of the invention. In addition, a moiety having Formula VII can be present at the 3′-end or the 5′-end of a hairpin siNA molecule as described herein.

[0106] In another embodiment, a siNA molecule of the invention comprises an abasic residue having Formula V or VI, wherein the abasic residue having Formula VI or VI is connected to the siNA construct in a 3′-3′, 3′-2′, 2′-3′, or 5′-5′ configuration, such as at the 3′-end, the 5′-end, or both of the 3′ and 5′-ends of one or both siNA strands.

[0107] In one embodiment, a siNA molecule of the invention comprises one or more (e.g., about 1, 2, 3, 4, 5, 6, 7, 8, 9, 10, or more) locked nucleic acid (LNA) nucleotides, for example, at the 5′-end, the 3′-end, both of the 5′ and 3′-ends, or any combination thereof, of the siNA molecule.

[0108] In one embodiment, a siNA molecule of the invention comprises one or more (e.g., about 1, 2, 3, 4, 5, 6, 7, 8, 9, 10, or more) 4′-thio nucleotides, for example, at the 5′-end, the 3′-end, both of the 5′ and 3′-ends, or any combination thereof, of the siNA molecule.

[0109] In another embodiment, a siNA molecule of the invention comprises one or more (e.g., about 1, 2, 3, 4, 5, 6, 7, 8, 9, 10, or more) acyclic nucleotides, for example, at the 5′-end, the 3′-end, both of the 5′ and 3′-ends, or any combination thereof, of the siNA molecule.

[0110] In one embodiment, the invention features a chemically-modified short interfering nucleic acid (siNA) molecule of the invention comprising a sense region, wherein any (e.g., one or more or all) pyrimidine nucleotides present in the sense region are 2′-deoxy-2′-fluoro pyrimidine nucleotides (e.g., wherein all pyrimidine nucleotides are 2′-deoxy-2′-fluoro pyrimidine nucleotides or alternately a plurality of pyrimidine nucleotides are 2′-deoxy-2′-fluoro pyrimidine nucleotides), and wherein any (e.g., one or more or all) purine nucleotides present in the sense region are 2′-deoxy purine nucleotides (e.g., wherein all purine nucleotides are 2′-deoxy purine nucleotides or alternately a plurality of purine nucleotides are 2′-deoxy purine nucleotides).

[0111] In one embodiment, the invention features a chemically-modified short interfering nucleic acid (siNA) molecule of the invention comprising a sense region, wherein any (e.g., one or more or all) pyrimidine nucleotides present in the sense region are 2′-deoxy-2′-fluoro, 4′-thio, 2′-O-trifluoromethyl, 2′-O-ethyl-trifluoromethoxy, or 2′-O-difluoromethoxy-ethoxy pyrimidine nucleotides (e.g., wherein all pyrimidine nucleotides are 2′-deoxy-2′-fluoro, 4′-thio, 2′-O-trifluoromethyl, 2′-O-ethyl-trifluoromethoxy, or 2′-O-difluoromethoxy-ethoxy pyrimidine nucleotides or alternately a plurality of pyrimidine nucleotides are 2′-deoxy-2′-fluoro, 4′-thio, 2′-O-trifluoromethyl, 2′-O-ethyl-trifluoromethoxy, or 2′-O-difluoromethoxy-ethoxy pyrimidine nucleotides), and wherein any (e.g., one or more or all) purine nucleotides present in the sense region are 2′-deoxy purine nucleotides (e.g., wherein all purine nucleotides are 2′-deoxy purine nucleotides or alternately a plurality of purine nucleotides are 2′-deoxy purine nucleotides), wherein any nucleotides comprising a 3′-terminal nucleotide overhang that are present in said sense region are 2′-deoxy nucleotides.

[0112] In one embodiment, the invention features a chemically-modified short interfering nucleic acid (siNA) molecule of the invention comprising a sense region, wherein any (e.g., one or more or all) pyrimidine nucleotides present in the sense region are 2′-deoxy-2′-fluoro, 4′-thio, 2′-O-trifluoromethyl, 2′-O-ethyl-trifluoromethoxy, or 2′-O-difluoromethoxy-ethoxy pyrimidine nucleotides (e.g., wherein all pyrimidine nucleotides are 2′-deoxy-2′-fluoro, 4′-thio, 2′-O-trifluoromethyl, 2′-O-ethyl-trifluoromethoxy, or 2′-O-difluoromethoxy-ethoxy pyrimidine nucleotides or alternately a plurality of pyrimidine nucleotides are 2′-deoxy-2′-fluoro, 4′-thio, 2′-O-trifluoromethyl, 2′-O-ethyl-trifluoromethoxy, or 2′-O-difluoromethoxy-ethoxy pyrimidine nucleotides), and wherein any (e.g., one or more or all) purine nucleotides present in the sense region are 2′-O-methyl purine nucleotides (e.g., wherein all purine nucleotides are 2′-O-methyl, 4′-thio, 2′-O-trifluoromethyl, 2′-O-ethyl-trifluoromethoxy, or 2′-O-difluoromethoxy-ethoxy purine nucleotides or alternately a plurality of purine nucleotides are 2′-O-methyl, 4′-thio, 2′-O-trifluoromethyl, 2′-O-ethyl-trifluoromethoxy, or 2′-O-difluoromethoxy-ethoxy purine nucleotides).

[0113] In one embodiment, the invention features a chemically-modified short interfering nucleic acid (siNA) molecule of the invention comprising a sense region, wherein any (e.g., one or more or all) pyrimidine nucleotides present in the sense region are 2′-deoxy-2′-fluoro, 4′-thio, 2′-O-trifluoromethyl, 2′-O-ethyl-trifluoromethoxy, or 2′-O-difluoromethoxy-ethoxy pyrimidine nucleotides (e.g., wherein all pyrimidine nucleotides are 2′-deoxy-2′-fluoro, 4′-thio, 2′-O-trifluoromethyl, 2′-O-ethyl-trifluoromethoxy, or 2′-O-difluoromethoxy-ethoxy pyrimidine nucleotides or alternately a plurality of pyrimidine nucleotides are 2′-deoxy-2′-fluoro, 4′-thio, 2′-O-trifluoromethyl, 2′-O-ethyl-trifluoromethoxy, or 2′-O-difluoromethoxy-ethoxy pyrimidine nucleotides), wherein any (e.g., one or more or all) purine nucleotides present in the sense region are 2′-O-methyl, 4′-thio, 2′-O-trifluoromethyl, 2′-O-ethyl-trifluoromethoxy, or 2′-O-difluoromethoxy-ethoxy purine nucleotides (e.g., wherein all purine nucleotides are 2′-O-methyl, 4′-thio, 2′-O-trifluoromethyl, 2′-O-ethyl-trifluoromethoxy, or 2′-O-difluoromethoxy-ethoxy purine nucleotides or alternately a plurality of purine nucleotides are 2′-O-methyl, 4′-thio, 2′-O-trifluoromethyl, 2′-O-ethyl-trifluoromethoxy, or 2′-O-difluoromethoxy-ethoxy purine nucleotides), and wherein any nucleotides comprising a 3′-terminal nucleotide overhang that are present in said sense region are 2′-deoxy nucleotides.

[0114] In one embodiment, the invention features a chemically-modified short interfering nucleic acid (siNA) molecule of the invention comprising an antisense region, wherein any (e.g., one or more or all) pyrimidine nucleotides present in the antisense region are 2′-deoxy-2′-fluoro, 4′-thio, 2′-O-trifluoromethyl, 2′-O-ethyl-trifluoromethoxy, or 2′-O-difluoromethoxy-ethoxy pyrimidine nucleotides (e.g., wherein all pyrimidine nucleotides are 2′-deoxy-2′-fluoro, 4′-thio, 2′-O-trifluoromethyl, 2′-O-ethyl-trifluoromethoxy, or 2′-O-difluoromethoxy-ethoxy pyrimidine nucleotides or alternately a plurality of pyrimidine nucleotides are 2′-deoxy-2′-fluoro, 4′-thio, 2′-O-trifluoromethyl, 2′-O-ethyl-trifluoromethoxy, or 2′-O-difluoromethoxy-ethoxy pyrimidine nucleotides), and wherein any (e.g., one or more or all) purine nucleotides present in the antisense region are 2′-O-methyl, 4′-thio, 2′-O-trifluoromethyl, 2′-O-ethyl-trifluoromethoxy, or 2′-O-difluoromethoxy-ethoxy purine nucleotides (e.g., wherein all purine nucleotides are 2′-O-methyl, 4′-thio, 2′-O-trifluoromethyl, 2′-O-ethyl-trifluoromethoxy, or 2′-O-difluoromethoxy-ethoxy purine nucleotides or alternately a plurality of purine nucleotides are 2′-O-methyl, 4′-thio, 2′-O-trifluoromethyl, 2′-O-ethyl-trifluoromethoxy, or 2′-O-difluoromethoxy-ethoxy purine nucleotides).

[0115] In one embodiment, the invention features a chemically-modified short interfering nucleic acid (siNA) molecule of the invention comprising an antisense region, wherein any (e.g., one or more or all) pyrimidine nucleotides present in the antisense region are 2′-deoxy-2′-fluoro, 4′-thio, 2′-O-trifluoromethyl, 2′-O-ethyl-trifluoromethoxy, or 2′-O-difluoromethoxy-ethoxy pyrimidine nucleotides (e.g., wherein all pyrimidine nucleotides are 2′-deoxy-2′-fluoro, 4′-thio, 2′-O-trifluoromethyl, 2′-O-ethyl-trifluoromethoxy, or 2′-O-difluoromethoxy-ethoxy pyrimidine nucleotides or alternately a plurality of pyrimidine nucleotides are 2′-deoxy-2′-fluoro, 4′-thio, 2′-O-trifluoromethyl, 2′-O-ethyl-trifluoromethoxy, or 2′-O-difluoromethoxy-ethoxy pyrimidine nucleotides), wherein any (e.g., one or more or all) purine nucleotides present in the antisense region are 2′-O-methyl, 4′-thio, 2′-O-trifluoromethyl, 2′-O-ethyl-trifluoromethoxy, or 2′-O-difluoromethoxy-ethoxy purine nucleotides (e.g., wherein all purine nucleotides are 2′-O-methyl, 4′-thio, 2′-O-trifluoromethyl, 2′-O-ethyl-trifluoromethoxy, or 2′-O-difluoromethoxy-ethoxy purine nucleotides or alternately a plurality of purine nucleotides are 2′-O-methyl, 4′-thio, 2′-O-trifluoromethyl, 2′-O-ethyl-trifluoromethoxy, or 2 ′-O-difluoromethoxy-ethoxy purine nucleotides), and wherein any nucleotides comprising a 3′-terminal nucleotide overhang that are present in said antisense region are 2′-deoxy nucleotides.

[0116] In one embodiment, the invention features a chemically-modified short interfering nucleic acid (siNA) molecule of the invention comprising an antisense region, wherein any (e.g., one or more or all) pyrimidine nucleotides present in the antisense region are 2′-deoxy-2′-fluoro, 4′-thio, 2′-O-trifluoromethyl, 2′-O-ethyl-trifluoromethoxy, or 2′-O-difluoromethoxy-ethoxy pyrimidine nucleotides (e.g., wherein all pyrimidine nucleotides are 2′-deoxy-2′-fluoro, 4′-thio, 2′-O-trifluoromethyl, 2′-O-ethyl-trifluoromethoxy, or 2′-O-difluoromethoxy-ethoxy pyrimidine nucleotides or alternately a plurality of pyrimidine nucleotides are 2′-deoxy-2′-fluoro, 4′-thio, 2′-O-trifluoromethyl, 2′-O-ethyl-trifluoromethoxy, or 2′-O-difluoromethoxy-ethoxy pyrimidine nucleotides), and wherein any (e.g., one or more or all) purine nucleotides present in the antisense region are 2′-deoxy purine nucleotides (e.g., wherein all purine nucleotides are 2′-deoxy purine nucleotides or alternately a plurality of purine nucleotides are 2′-deoxy purine nucleotides).

[0117] In one embodiment, the invention features a chemically-modified short interfering nucleic acid (siNA) molecule of the invention comprising an antisense region, wherein any (e.g., one or more or all) pyrimidine nucleotides present in the antisense region are 2′-deoxy-2′-fluoro, 4′-thio, 2′-O-trifluoromethyl, 2′-O-ethyl-trifluoromethoxy, or 2′-O-difluoromethoxy-ethoxy pyrimidine nucleotides (e.g., wherein all pyrimidine nucleotides are 2′-deoxy-2′-fluoro, 4′-thio, 2′-O-trifluoromethyl, 2′-O-ethyl-trifluoromethoxy, or 2′-O-difluoromethoxy-ethoxy pyrimidine nucleotides or alternately a plurality of pyrimidine nucleotides are 2′-deoxy-2′-fluoro, 4′-thio, 2′-O-trifluoromethyl, 2′-O-ethyl-trifluoromethoxy, or 2′-O-difluoromethoxy-ethoxy pyrimidine nucleotides), and wherein any (e.g., one or more or all) purine nucleotides present in the antisense region are 2′-O-methyl, 4′-thio, 2′-O-trifluoromethyl, 2′-O-ethyl-trifluoromethoxy, or 2′-O-difluoromethoxy-ethoxy purine nucleotides (e.g., wherein all purine nucleotides are 2′-O-methyl, 4′-thio, 2′-O-trifluoromethyl, 2′-O-ethyl-trifluoromethoxy, or 2′-O-difluoromethoxy-ethoxy purine nucleotides or alternately a plurality of purine nucleotides are 2′-O-methyl, 4′-thio, 2′-O-trifluoromethyl, 2′-O-ethyl-trifluoromethoxy, or 2′-O-difluoromethoxy-ethoxy purine nucleotides).

[0118] In one embodiment, the invention features a chemically-modified short interfering nucleic acid (siNA) molecule of the invention capable of mediating RNA interference (RNAi) inside a cell or reconstituted in vitro system comprising a sense region, wherein one or more pyrimidine nucleotides present in the sense region are 2′-deoxy-2′-fluoro, 4′-thio, 2′-O-trifluoromethyl, 2′-O-ethyl-trifluoromethoxy, or 2′-O-difluoromethoxy-ethoxy pyrimidine nucleotides (e.g., wherein all pyrimidine nucleotides are 2′-deoxy-2′-fluoro, 4′-thio, 2′-O-trifluoromethyl, 2′-O-ethyl-trifluoromethoxy, or 2′-O-difluoromethoxy-ethoxy pyrimidine nucleotides or alternately a plurality of pyrimidine nucleotides are 2′-deoxy-2′-fluoro, 4′-thio, 2′-O-trifluoromethyl, 2′-O-ethyl-trifluoromethoxy, or 2′-O-difluoromethoxy-ethoxy pyrimidine nucleotides), and one or more purine nucleotides present in the sense region are 2′-deoxy purine nucleotides (e.g., wherein all purine nucleotides are 2′-deoxy purine nucleotides or alternately a plurality of purine nucleotides are 2′-deoxy purine nucleotides), and an antisense region, wherein one or more pyrimidine nucleotides present in the antisense region are 2′-deoxy-2′-fluoro, 4′-thio, 2′-O-trifluoromethyl, 2′-O-ethyl-trifluoromethoxy, or 2′-O-difluoromethoxy-ethoxy pyrimidine nucleotides (e.g., wherein all pyrimidine nucleotides are 2′-deoxy-2′-fluoro, 4′-thio, 2′-O-trifluoromethyl, 2′-O-ethyl-trifluoromethoxy, or 2′-O-difluoromethoxy-ethoxy pyrimidine nucleotides or alternately a plurality of pyrimidine nucleotides are 2′-deoxy-2′-fluoro, 4′-thio, 2′-O-trifluoromethyl, 2′-O -ethyl-trifluoromethoxy, or 2′-O-difluoromethoxy-ethoxy pyrimidine nucleotides), and one or more purine nucleotides present in the antisense region are 2′-O-methyl, 4′-thio, 2′-O-trifluoromethyl, 2′-O-ethyl-trifluoromethoxy, or 2′-O-difluoromethoxy-ethoxy purine nucleotides (e.g., wherein all purine nucleotides are 2′-O-methyl, 4′-thio, 2′-O-trifluoromethyl, 2′-O-ethyl- trifluoromethoxy, or 2′-O-difluoromethoxy-ethoxy purine nucleotides or alternately a plurality of purine nucleotides are 2′-O-methyl, 4′-thio, 2′-O-trifluoromethyl, 2′-O-ethyl-trifluoromethoxy, or 2′-O-difluoromethoxy-ethoxy purine nucleotides). The sense region and/or the antisense region can have a terminal cap modification, such as any modification described herein or shown in FIG. 10, that is optionally present at the 3′-end, the 5′-end, or both of the 3′ and 5′-ends of the sense and/or antisense sequence. The sense and/or antisense region can optionally further comprise a 3′-terminal nucleotide overhang having about 1 to about 4 (e.g., about 1, 2, 3, or 4) 2′-deoxynucleotides. The overhang nucleotides can further comprise one or more (e.g., about 1, 2, 3, 4 or more) phosphorothioate, phosphonoacetate, and/or thiophosphonoacetate internucleotide linkages. Non-limiting examples of these chemically-modified siNAs are shown in FIGS. 4 and 5 and Table III herein. In any of these described embodiments, the purine nucleotides present in the sense region are alternatively 2′-O-methyl, 4′-thio, 2′-O-trifluoromethyl, 2′-O-ethyl-trifluoromethoxy, or 2′-O-difluoromethoxy-ethoxy purine nucleotides (e.g., wherein all purine nucleotides are 2′-O-methyl, 4′-thio, 2′-O-trifluoromethyl, 2′-O-ethyl-trifluoromethoxy, or 2′-O-difluoromethoxy-ethoxy purine nucleotides or alternately a plurality of purine nucleotides are 2′-O-methyl, 4′-thio, 2′-O-trifluoromethyl, 2′-O-ethyl-trifluoromethoxy, or 2′-O-difluoromethoxy-ethoxy purine nucleotides) and one or more purine nucleotides present in the antisense region are 2′-O-methyl, 4′-thio, 2′-O-trifluoromethyl, 2′-O-ethyl-trifluoromethoxy, or 2′-O-difluoromethoxy-ethoxy purine nucleotides (e.g., wherein all purine nucleotides are 2′-O-methyl, 4′-thio, 2′-O-trifluoromethyl, 2′-O-ethyl-trifluoromethoxy, or 2′-O-difluoromethoxy-ethoxy purine nucleotides or alternately a plurality of purine nucleotides are 2′-O-methyl, 4′-thio, 2′-O-trifluoromethyl, 2′-O-ethyl-trifluoromethoxy, or 2′-O-difluoromethoxy-ethoxy purine nucleotides). Also, in any of these embodiments, one or more purine nucleotides present in the sense region are alternatively purine ribonucleotides (e.g., wherein all purine nucleotides are purine ribonucleotides or alternately a plurality of purine nucleotides are purine ribonucleotides) and any purine nucleotides present in the antisense region are 2′-O-methyl, 4′-thio, 2′-O-trifluoromethyl, 2′-O-ethyl-trifluoromethoxy, or 2′-O-difluoromethoxy-ethoxy purine nucleotides (e.g., wherein all purine nucleotides are 2′-O-methyl, 4′-thio, 2′-O-trifluoromethyl, 2′-O-ethyl-trifluoromethoxy, or 2′-O-difluoromethoxy-ethoxy purine nucleotides or alternately a plurality of purine nucleotides are 2′-O-methyl, 4′-thio, 2′-O-trifluoromethyl, 2′-O-ethyl-trifluoromethoxy, or 2′-O-difluoromethoxy-ethoxy purine nucleotides). Additionally, in any of these embodiments, one or more purine nucleotides present in the sense region and/or present in the antisense region are alternatively selected from the group consisting of 2′-deoxy nucleotides, locked nucleic acid (LNA) nucleotides, 2′-methoxyethyl nucleotides, 4′-thionucleotides, 2′-O-trifluoromethyl nucleotides, 2′-O-ethyl-trifluoromethoxy nucleotides, 2′-O-difluoromethoxy-ethoxy nucleotides and 2′-O-methyl nucleotides (e.g., wherein all purine nucleotides are selected from the group consisting of 2′-deoxy nucleotides, locked nucleic acid (LNA) nucleotides, 2′-methoxyethyl nucleotides, 4′-thionucleotides, 2′-O-trifluoromethyl nucleotides, 2′-O-ethyl-trifluoromethoxy nucleotides, 2′-O-difluoromethoxy-ethoxy nucleotides and 2′-O-methyl nucleotides or alternately a plurality of purine nucleotides are selected from the group consisting of 2′-deoxy nucleotides, locked nucleic acid (LNA) nucleotides, 2′-methoxyethyl nucleotides, 4′-thionucleotides, 2′-O-trifluoromethyl nucleotides, 2′-O-ethyl-trifluoromethoxy nucleotides, 2′-O-difluoromethoxy-ethoxy nucleotides and 2′-O-methyl nucleotides).

[0119] In another embodiment, any modified nucleotides present in the siNA molecules of the invention, preferably in the antisense strand of the siNA molecules of the invention, but also optionally in the sense and/or both antisense and sense strands, comprise modified nucleotides having properties or characteristics similar to naturally occurring ribonucleotides. For example, the invention features siNA molecules including modified nucleotides having a Northern conformation (e.g., Northern pseudorotation cycle, see for example Saenger, Principles of Nucleic Acid Structure, Springer-Verlag ed., 1984) otherwise known as a “ribo-like” or “A-form helix” configuration. As such, chemically modified nucleotides present in the siNA molecules of the invention, preferably in the antisense strand of the siNA molecules of the invention, but also optionally in the sense and/or both antisense and sense strands, are resistant to nuclease degradation while at the same time maintaining the capacity to mediate RNAi. Non-limiting examples of nucleotides having a northern configuration include locked nucleic acid (LNA) nucleotides (e.g., 2′-O, 4′-C-methylene-(D-ribofuranosyl) nucleotides); 2′-methoxyethoxy (MOE) nucleotides; 2′-methyl-thio-ethyl, 2′-deoxy-2′-fluoro nucleotides, 2′-deoxy-2′-chloro nucleotides, 2′-azido nucleotides, 2′-O-trifluoromethyl nucleotides, 2′-O-ethyl-trifluoromethoxy nucleotides, 2′-O-difluoromethoxy-ethoxy nucleotides, 4′-thio nucleotides and 2′-O-methyl nucleotides.

[0120] In one embodiment, the sense strand of a double stranded siNA molecule of the invention comprises a terminal cap moiety, (see for example FIG. 10) such as an inverted deoxyabaisc moiety, at the 3′-end, 5′-end, or both 3′ and 5′-ends of the sense strand.

[0121] In one embodiment, the invention features a chemically-modified short interfering nucleic acid molecule (siNA) capable of mediating RNA interference (RNAi) inside a cell or reconstituted in vitro system, wherein the chemical modification comprises a conjugate covalently attached to the chemically-modified siNA molecule. Non-limiting examples of conjugates contemplated by the invention include conjugates and ligands described in Vargeese et al., U.S. Ser. No. 10/427,160, filed Apr. 30, 2003, incorporated by reference herein in its entirety, including the drawings. In another embodiment, the conjugate is covalently attached to the chemically-modified siNA molecule via a biodegradable linker. In one embodiment, the conjugate molecule is attached at the 3′-end of either the sense strand, the antisense strand, or both strands of the chemically-modified siNA molecule. In another embodiment, the conjugate molecule is attached at the 5′-end of either the sense strand, the antisense strand, or both strands of the chemically-modified siNA molecule. In yet another embodiment, the conjugate molecule is attached both the 3′-end and 5′-end of either the sense strand, the antisense strand, or both strands of the chemically-modified siNA molecule, or any combination thereof. In one embodiment, a conjugate molecule of the invention comprises a molecule that facilitates delivery of a chemically-modified siNA molecule into a biological system, such as a cell. In another embodiment, the conjugate molecule attached to the chemically-modified siNA molecule is a ligand for a cellular receptor, such as peptides derived from naturally occurring protein ligands; protein localization sequences, including cellular ZIP code sequences; antibodies; nucleic acid aptamers; vitamins and other co-factors, such as folate and N-acetylgalactosamine; polymers, such as polyethyleneglycol (PEG); phospholipids; cholesterol; steroids, and polyamines, such as PEI, spermine or spermidine. Examples of specific conjugate molecules contemplated by the instant invention that can be attached to chemically-modified siNA molecules are described in Vargeese et al., U.S. Ser. No. 10/201,394, filed Jul. 22, 2002 incorporated by reference herein. The type of conjugates used and the extent of conjugation of siNA molecules of the invention can be evaluated for improved pharmacokinetic profiles, bioavailability, and/or stability of siNA constructs while at the same time maintaining the ability of the siNA to mediate RNAi activity. As such, one skilled in the art can screen siNA constructs that are modified with various conjugates to determine whether the siNA conjugate complex possesses improved properties while maintaining the ability to mediate RNAi, for example in animal models as are generally known in the art.

[0122] In one embodiment, the invention features a short interfering nucleic acid (siNA) molecule of the invention, wherein the siNA further comprises a nucleotide, non-nucleotide, or mixed nucleotide/non-nucleotide linker that joins the sense region of the siNA to the antisense region of the siNA. In one embodiment, a nucleotide, non-nucleotide, or mixed nucleotide/non-nucleotide linker is used, for example, to attach a conjugate moiety to the siNA. In one embodiment, a nucleotide linker of the invention can be a linker of >2 nucleotides in length, for example about 3, 4, 5, 6, 7, 8, 9, or 10 nucleotides in length. In another embodiment, the nucleotide linker can be a nucleic acid aptamer. By “aptamer” or “nucleic acid aptamer” as used herein is meant a nucleic acid molecule that binds specifically to a target molecule wherein the nucleic acid molecule has sequence that comprises a sequence recognized by the target molecule in its natural setting. Alternately, an aptamer can be a nucleic acid molecule that binds to a target molecule where the target molecule does not naturally bind to a nucleic acid. The target molecule can be any molecule of interest. For example, the aptamer can be used to bind to a ligand-binding domain of a protein, thereby preventing interaction of the naturally occurring ligand with the protein. This is a non-limiting example and those in the art will recognize that other embodiments can be readily generated using techniques generally known in the art. (See, for example, Gold et al., 1995, Annu. Rev. Biochem., 64, 763; Brody and Gold, 2000, J Biotechnol., 74, 5; Sun, 2000, Curr. Opin. Mol. Ther., 2, 100; Kusser, 2000, J Biotechnol., 74, 27; Hermann and Patel, 2000, Science, 287, 820; and Jayasena, 1999, Clinical Chemistry, 45, 1628. )

[0123] In yet another embodiment, a non-nucleotide linker of the invention comprises abasic nucleotide, polyether, polyamine, polyamide, peptide, carbohydrate, lipid, polyhydrocarbon, or other polymeric compounds (e.g. polyethylene glycols such as those having between 2 and 100 ethylene glycol units). Specific examples include those described by Seela and Kaiser, Nucleic Acids Res. 1990, 18:6353 and Nucleic Acids Res. 1987, 15:3113; Cload and Schepartz, J Am. Chem. Soc. 1991, 113:6324; Richardson and Schepartz, J Am. Chem. Soc. 1991, 113:5109; Ma et al., Nucleic Acids Res. 1993, 21:2585 and Biochemistry 1993, 32:1751; Durand et al., Nucleic Acids Res. 1990, 18:6353; McCurdy et al., Nucleosides & Nucleotides 1991, 10:287; Jschke et al., Tetrahedron Lett. 1993, 34:301; Ono et al., Biochemistry 1991, 30:9914; Arnold et al., International Publication No. WO 89/02439; Usman et al., International Publication No. WO 95/06731; Dudycz et al., International Publication No. WO 95/11910 and Ferentz and Verdine, J Am. Chem. Soc. 1991, 113:4000, all hereby incorporated by reference herein. A “non-nucleotide” further means any group or compound that can be incorporated into a nucleic acid chain in the place of one or more nucleotide units, including either sugar and/or phosphate substitutions, and allows the remaining bases to exhibit their enzymatic activity. The group or compound can be abasic in that it does not contain a commonly recognized nucleotide base, such as adenosine, guanine, cytosine, uracil or thymine, for example at the C1 position of the sugar.

[0124] In one embodiment, the invention features a short interfering nucleic acid (siNA) molecule capable of mediating RNA interference (RNAi) inside a cell or reconstituted in vitro system, wherein one or both strands of the siNA molecule that are assembled from two separate oligonucleotides do not comprise any ribonucleotides. For example, a siNA molecule can be assembled from a single oligonculeotide where the sense and antisense regions of the siNA comprise separate oligonucleotides that do not have any ribonucleotides (e.g., nucleotides having a 2′-OH group) present in the oligonucleotides. In another example, a siNA molecule can be assembled from a single oligonculeotide where the sense and antisense regions of the siNA are linked or circularized by a nucleotide or non-nucleotide linker as described herein, wherein the oligonucleotide does not have any ribonucleotides (e.g., nucleotides having a 2′-OH group) present in the oligonucleotide. Applicant has surprisingly found that the presense of ribonucleotides (e.g., nucleotides having a 2′-hydroxyl group) within the siNA molecule is not required or essential to support RNAi activity. As such, in one embodiment, all positions within the siNA can include chemically modified nucleotides and/or non-nucleotides such as nucleotides and or non-nucleotides having Formula I, II, III, IV, V, VI, or VII or any combination thereof to the extent that the ability of the siNA molecule to support RNAi activity in a cell is maintained.

[0125] In one embodiment, a siNA molecule of the invention is a single stranded siNA molecule that mediates RNAi activity in a cell or reconstituted in vitro system comprising a single stranded polynucleotide having complementarity to a target nucleic acid sequence. In another embodiment, the single stranded siNA molecule of the invention comprises a 5′-terminal phosphate group. In another embodiment, the single stranded siNA molecule of the invention comprises a 5′-terminal phosphate group and a 3′-terminal phosphate group (e.g., a 2′,3′-cyclic phosphate). In another embodiment, the single stranded siNA molecule of the invention comprises about 15 to about 30 (e.g., about 15, 16, 17, 18, 19, 20, 21, 22, 23, 24, 25, 26, 27, 28, 29, or 30) nucleotides. In yet another embodiment, the single stranded siNA molecule of the invention comprises one or more chemically modified nucleotides or non-nucleotides described herein. For example, all the positions within the siNA molecule can include chemically-modified nucleotides such as nucleotides having any of Formulae I-VII, or any combination thereof to the extent that the ability of the siNA molecule to support RNAi activity in a cell is maintained.

[0126] In one embodiment, a siNA molecule of the invention is a single stranded siNA molecule that mediates RNAi activity in a cell or reconstituted in vitro system comprising a single stranded polynucleotide having complementarity to a target nucleic acid sequence, wherein one or more pyrimidine nucleotides present in the siNA are 2′-deoxy-2′-fluoro, 4′-thio, 2′-O-trifluoromethyl, 2′-O-ethyl-trifluoromethoxy, or 2′-O-difluoromethoxy-ethoxy pyrimidine nucleotides (e.g., wherein all pyrimidine nucleotides are 2′-deoxy-2′-fluoro, 4′-thio, 2′-O-trifluoromethyl, 2′-O-ethyl-trifluoromethoxy, or 2′-O-difluoromethoxy-ethoxy pyrimidine nucleotides or alternately a plurality of pyrimidine nucleotides are 2′-deoxy-2′-fluoro, 4′-thio, 2′-O-trifluoromethyl, 2′-O-ethyl-trifluoromethoxy, or 2′-O-difluoromethoxy-ethoxy pyrimidine nucleotides), and wherein any purine nucleotides present in the antisense region are 2′-O-methyl, 4′-thio, 2′-O-trifluoromethyl, 2′-O-ethyl-trifluoromethoxy, or 2′-O -difluoromethoxy-ethoxy purine nucleotides (e.g., wherein all purine nucleotides are 2′-O-methyl, 4′-thio, 2′-O-trifluoromethyl, 2′-O-ethyl-trifluoromethoxy, or 2′-O-difluoromethoxy-ethoxy purine nucleotides or alternately a plurality of purine nucleotides are 2′-O-methyl, 4′-thio, 2′-O-trifluoromethyl, 2′-O-ethyl-trifluoromethoxy, or 2′-O-difluoromethoxy-ethoxy purine nucleotides), and a terminal cap modification, such as any modification described herein or shown in FIG. 10, that is optionally present at the 3′-end, the 5′-end, or both of the 3′ and 5′-ends of the antisense sequence. The siNA optionally further comprises about 1 to about 4 or more (e.g., about 1, 2, 3, 4 or more) terminal 2′-deoxynucleotides at the 3′-end of the siNA molecule, wherein the terminal nucleotides can further comprise one or more (e.g., 1, 2, 3, 4 or more) phosphorothioate, phosphonoacetate, and/or thiophosphonoacetate intemucleotide linkages, and wherein the siNA optionally further comprises a terminal phosphate group, such as a 5′-terminal phosphate group. In any of these embodiments, any purine nucleotides present in the antisense region are alternatively 2′-deoxy purine nucleotides (e.g., wherein all purine nucleotides are 2′-deoxy purine nucleotides or alternately a plurality of purine nucleotides are 2′-deoxy purine nucleotides). Also, in any of these embodiments, any purine nucleotides present in the siNA (i.e., purine nucleotides present in the sense and/or antisense region) can alternatively be locked nucleic acid (LNA) nucleotides (e.g., wherein all purine nucleotides are LNA nucleotides or alternately a plurality of purine nucleotides are LNA nucleotides). Also, in any of these embodiments, any purine nucleotides present in the siNA are alternatively 2′-methoxyethyl purine nucleotides (e.g., wherein all purine nucleotides are 2′-methoxyethyl purine nucleotides or alternately a plurality of purine nucleotides are 2′-methoxyethyl purine nucleotides). In another embodiment, any modified nucleotides present in the single stranded siNA molecules of the invention comprise modified nucleotides having properties or characteristics similar to naturally occurring ribonucleotides. For example, the invention features siNA molecules including modified nucleotides having a Northern conformation (e.g., Northern pseudorotation cycle, see for example Saenger, Principles of Nucleic Acid Structure, Springer-Verlag ed., 1984). As such, chemically modified nucleotides present in the single stranded siNA molecules of the invention are preferably resistant to nuclease degradation while at the same time maintaining the capacity to mediate RNAi.

[0127] In one embodiment, a siNA molecule of the invention comprises chemically modified nucleotides or non-nucleotides (e.g., having any of Formulae I-VII, such as 2′-deoxy, 2′-deoxy-2′-fluoro, 4′-thio, 2′-O-trifluoromethyl, 2′-O-ethyl-trifluoromethoxy, 2′-O-difluoromethoxy-ethoxy or 2′-O-methyl nucleotides) at alternating positions within one or more strands or regions of the siNA molecule. For example, such chemical modifications can be introduced at every other position of a RNA based siNA molecule, starting at either the first or second nucleotide from the 3′-end or 5′-end of the siNA. In a non-limiting example, a double stranded siNA molecule of the invention in which each strand of the siNA is 21 nucleotides in length is featured wherein positions 1, 3, 5, 7, 9, 11, 13, 15, 17, 19 and 21 of each strand are chemically modified (e.g., with compounds having any of Formulae I-VII, such as such as 2′-deoxy, 2′-deoxy-2′-fluoro, 4′-thio, 2′-O-trifluoromethyl, 2′-O-ethyl-trifluoromethoxy, 2′-O-difluoromethoxy-ethoxy or 2′-O-methyl nucleotides). In another non-limiting example, a double stranded siNA molecule of the invention in which each strand of the siNA is 21 nucleotides in length is featured wherein positions 2, 4, 6, 8, 10, 12, 14, 16, 18, and 20 of each strand are chemically modified (e.g., with compounds having any of Formulae I-VII, such as such as 2′-deoxy, 2′-deoxy-2′-fluoro, 4′-thio, 2′-O-trifluoromethyl, 2′-O-ethyl-trifluoromethoxy, 2′-O-difluoromethoxy-ethoxy or 2′-O-methyl nucleotides). In one embodiment, one strand of the double stranded siNA molecule comprises chemical modifications at positions 2, 4, 6, 8, 10, 12, 14, 16, 18, and 20 and chemical modifications at positions 1, 3, 5, 7, 9, 11, 13, 15, 17, 19 and 21. Such siNA molecules can further comprise terminal cap moieties and/or backbone modifications as described herein.

[0128] In one embodiment, a siNA molecule of the invention comprises the following features: if purine nucleotides are present at the 5′-end (e.g., at any of terminal nucleotide positions 1, 2, 3, 4, 5, or 6 from the 5′-end) of the antisense strand or antisense region (otherwise referred to as the guide sequence or guide strand) of the siNA molecule then such purine nucleosides are ribonucleotides. In another embodiment, the purine ribonucleotides, when present, are base paired to nucleotides of the sense strand or sense region (otherwise referred to as the passenger strand) of the siNA molecule. Such purine ribonucleotides can be present in a siNA stabilization motif that otherwise comprises modified nucleotides.

[0129] In one embodiment, a siNA molecule of the invention comprises the following features: if pyrimidine nucleotides are present at the 5′-end (e.g., at any of terminal nucleotide positions 1, 2, 3, 4, 5, or 6 from the 5′-end) of the antisense strand or antisense region (otherwise referred to as the guide sequence or guide strand) of the siNA molecule then such pyrimidine nucleosides are ribonucleotides. In another embodiment, the pyrimidine ribonucleotides, when present, are base paired to nucleotides of the sense strand or sense region (otherwise referred to as the passenger strand) of the siNA molecule. Such pyrimidine ribonucleotides can be present in a siNA stabilization motif that otherwise comprises modified nucleotides.

[0130] In one embodiment, a siNA molecule of the invention comprises the following features: if pyrimidine nucleotides are present at the 5′-end (e.g., at any of terminal nucleotide positions 1, 2, 3, 4, 5, or 6 from the 5′-end) of the anfisense strand or antisense region (otherwise referred to as the guide sequence or guide strand) of the siNA molecule then such pyrimidine nucleosides are modified nucleotides. In another embodiment, the modified pyrimidine nucleotides, when present, are base paired to nucleotides of the sense strand or sense region (otherwise referred to as the passenger strand) of the siNA molecule. Non-limiting examples of modified pyrimidine nucleotides include those having any of Formulae I-VII, such as such as 2′-deoxy, 2′-deoxy-2′-fluoro, 4′-thio, 2′-O-trifluoromethyl, 2′-O-ethyl-trifluoromethoxy, 2′-O-difluoromethoxy-ethoxy or 2′-O-methyl nucleotides.

[0131] In one embodiment, the invention features a double stranded nucleic acid molecule having structure SI comprising a sense strand and an antisenes strand: [chemical structure]
wherein each N is independently a nucleotide; each B is a terminal cap moiety that can be present or absent; (N) represents non-base paired or overhanging nucleotides which can be unmodified or chemically modified; [N] represents nucleotide positions wherein any purine nucleotides when present are ribonucleotides; X1 and X2 are independently integers from about 0 to about 4; X3 is an integer from about 9 to about 21; X4 is an integer from about 11 to about 20, provided that the sum of X4 and X5 is between 17-21; X5 is an integer from about 1 to about 6; and
[0132] (a) any pyridmidine nucleotides present in the antisense strand (lower strand) are 2′-deoxy-2′-fluoro nucleotides; any purine nucleotides present in the antisense strand (lower strand) other than the purines nucleotides in the [N] nucleotide positions, are independently 2′-O-methyl nucleotides, 2′-deoxyribonucleotides or a combination of 2′-deoxyribonucleotides and 2′-O-methyl nucleotides;
[0133] (b) any pyrimidine nucleotides present in the sense strand (upper strand) are 2′-deoxy-2′-fluoro nucleotides; any purine nucleotides present in the sense strand (upper strand) are independently 2′-deoxyribonucleotides, 2′-O-methyl nucleotides or a combination of 2′-deoxyribonucleotides and 2′-O-methyl nucleotides; and
[0134] (c) any (N) nucleotides are optionally deoxyribonucleotides.

[0135] In one embodiment, the invention features a double stranded nucleic acid molecule having structure SII comprising a sense strand and an antisenes strand: [chemical structure]
wherein each N is independently a nucleotide; each B is a terminal cap moiety that can be present or absent; (N) represents non-base paired or overhanging nucleotides which can be unmodified or chemically modified; [N] represents nucleotide positions wherein any purine nucleotides when present are ribonucleotides; X1 and X2 are independently integers from about 0 to about 4; X3 is an integer from about 9 to about 21; X4 is an integer from about 11 to about 20, provided that the sum of X4 and X5 is between 17-21; X5 is an integer from about 1 to about 6; and
[0136] (a) any pyridmidine nucleotides present in the antisense strand (lower strand) are 2′-deoxy-2′-fluoro nucleotides; any purine nucleotides present in the antisense strand (lower strand) other than the purines nucleotides in the [N] nucleotide positions, are 2′-O-methyl nucleotides;
[0137] (b) any pyrimidine nucleotides present in the sense strand (upper strand) are ribonucleotides; any purine nucleotides present in the sense strand (upper strand) are ribonucleotides; and
[0138] (c) any (N) nucleotides are optionally deoxyribonucleotides.

[0139] In one embodiment, the invention features a double stranded nucleic acid molecule having structure Sill comprising a sense strand and an antisenes strand: [chemical structure]
wherein each N is independently a nucleotide; each B is a terminal cap moiety that can be present or absent; (N) represents non-base paired or overhanging nucleotides which can be unmodified or chemically modified; [N] represents nucleotide positions wherein any purine nucleotides when present are ribonucleotides; X1 and X2 are independently integers from about 0 to about 4; X3 is an integer from about 9 to about 21; X4 is an integer from about 11 to about 20, provided that the sum of X4 and X5 is between 17-21; X5 is an integer from about 1 to about 6; and
[0140] (a) any pyridmidine nucleotides present in the antisense strand (lower strand) are 2′-deoxy-2′-fluoro nucleotides; any purine nucleotides present in the antisense strand (lower strand) other than the purines nucleotides in the [N] nucleotide positions, are 2′-O-methyl nucleotides;
[0141] (b) any pyrimidine nucleotides present in the sense strand (upper strand) are 2′-deoxy-2′-fluoro nucleotides; any purine nucleotides present in the sense strand (upper strand) are ribonucleotides; and
[0142] (c) any (N) nucleotides are optionally deoxyribonucleotides.

[0143] In one embodiment, the invention features a double stranded nucleic acid molecule having structure SIV comprising a sense strand and an antisenes strand: [chemical structure]
wherein each N is independently a nucleotide; each B is a terminal cap moiety that can be present or absent; (N) represents non-base paired or overhanging nucleotides which can be unmodified or chemically modified; [N] represents nucleotide positions wherein any purine nucleotides when present are ribonucleotides; X1 and X2 are independently integers from about 0 to about 4; X3 is an integer from about 9 to about 21; X4 is an integer from about 11 to about 20, provided that the sum of X4 and X5 is between 17-21; X5 is an integer from about 1 to about 6; and
[0144] (a) any pyridmidine nucleotides present in the antisense strand (lower strand) are 2′-deoxy-2′-fluoro nucleotides; any purine nucleotides present in the antisense strand (lower strand) other than the purines nucleotides in the [N] nucleotide positions, are 2′-O-methyl nucleotides;
[0145] (b) any pyrimidine nucleotides present in the sense strand (upper strand) are 2′-deoxy-2′-fluoro nucleotides; any purine nucleotides present in the sense strand (upper strand) are deoxyribonucleotides; and
[0146] (c) any (N) nucleotides are optionally deoxyribonucleotides.

[0147] In one embodiment, the invention features a double stranded nucleic acid molecule having structure SV comprising a sense strand and an antisenes strand: [chemical structure]
wherein each N is independently a nucleotide; each B is a terminal cap moiety that can be present or absent; (N) represents non-base paired or overhanging nucleotides which can be unmodified or chemically modified; [N] represents nucleotide positions wherein any purine nucleotides when present are ribonucleotides; X1 and X2 are independently integers from about 0 to about 4; X3 is an integer from about 9 to about 21; X4 is an integer from about 11 to about 20, provided that the sum of X4 and X5 is between 17-21; X5 is an integer from about 1 to about 6; and
[0148] (a) any pyridmidine nucleotides present in the antisense strand (lower strand) are nucleotides having a ribo-like configuration (e.g., Northern or A-form helix configuration); any purine nucleotides present in the antisense strand (lower strand) other than the purines nucleotides in the [N] nucleotide positions, are 2′-O-methyl nucleotides;
[0149] (b) any pyrimidine nucleotides present in the sense strand (upper strand) are nucleotides having a ribo-like configuration (e.g., Northern or A-form helix configuration); any purine nucleotides present in the sense strand (upper strand) are 2′-O-methyl nucleotides; and
[0150] (c) any (N) nucleotides are optionally deoxyribonucleotides.

[0151] In one embodiment, a double stranded nucleic acid molecule having any of structure SI, SII, SIII, SIV, SV, or SVI comprises an antisense strand having complementarity to influenza virus RNA. In another embodiment, the influenza virus RNA is influenza A, B, or C RNA. In another embodiment, the influenza virus RNA is derived from strain influenza A, H5N1. In another embodiment, the influenza virus RNA is conserved across all influenza A strains. In another embodiment, the influenza virus RNA is conserved across all influenza B or C strains.

[0152] In one embodiment, a double stranded nucleic acid molecule having any of structure SI, SII, SIII, SIV, SV, or SVI comprises an antisense strand having complementarity to more than one influenza virus RNA wherein the influenza virus RNAs each have sequence homology. In one embodiment, the influenza virus RNAs are plus strand and minus strand RNAs. In one embodiment, the influenza RNAs are homologous across any of influenza HA, NA, NP, M, NS, PA, PB1, or PB2 genes. In one embodiment, the influenza RNAs are homologous across different influenza virus strains or subtypes, such as any of HA, e.g., H1, H2, H3, H4, H5, H6, H7, H8, H9, H10, H11, H12, H13, H14, H15, H16; and NA, e.g., N1, N2, N3, N4, N5, N6, N7, N8 or N9 genes.

[0153] In one embodiment, a double stranded nucleic acid molecule having any of structure SI, SII, SIII, SIV, SV, or SVI comprises a terminal phosphate group at the 5′-end of the antisense strand or antisense region of the nucleic acid molecule.

[0154] In one embodiment, a double stranded nucleic acid molecule having any of structure SI, SII, SIII, SIV, SV, or SVI comprises X5=1, 2, or 3; each X1 and X2 =1 or 2; X3=12, 13, 14, 15, 16, 17, 18, 19, 20, 21, 22, 23, 24, 25, 26, 27, 28, 29, or 30, and X4=15, 16, 17, 18, 19,20, 21, 22, 23, 24, 25, 26, 27,28, 29, or 30.

[0155] In one embodiment, a double stranded nucleic acid molecule having any of structure SI, SII, SIll, SIV, SV, or SVI comprises X5=1; each X1 and X2=2; X3=19, and X4=18.

[0156] In one embodiment, a double stranded nucleic acid molecule having any of structure SI, SII, SIII, SIV, SV, or SVI comprises X5=2; each X1 and X2=2; X3=19, and X4=17

[0157] In one embodiment, a double stranded nucleic acid molecule having any of structure SI, SII, SIII, SIV, SV, or SVI comprises X5=3; each X1 and X2=2; X3=19, and X4=16.

[0158] In one embodiment, a double stranded nucleic acid molecule having any of structure SI, SII, SIII, SIV, SV, or SVI comprises B at the 3′ and 5′ ends of the sense strand or sense region.

[0159] In one embodiment, a double stranded nucleic acid molecule having any of structure SI, SII, SIII, SIV, SV, or SVI comprises B at the 3′-end of the antisense strand or antisense region.

[0160] In one embodiment, a double stranded nucleic acid molecule having any of structure SI, SII, SIII, SIV, SV, or SVI comprises B at the 3′ and 5′ ends of the sense strand or sense region and B at the 3′-end of the antisense strand or antisense region.

[0161] In one embodiment, a double stranded nucleic acid molecule having any of structure SI, SII, SIII, SIV, SV, or SVI further comprises one or more phosphorothioate internucleotide linkages at the first terminal (N) on the 3′ end of the sense strand, antisense strand, or both sense strand and antisense strands of the nucleic acid molecule. For example, a double stranded nucleic acid molecule can comprise X1 and/or X2=2 having overhanging nucleotide positions with a phosphorothioate internucleotide linkage, e.g., (NsN) where “s” indicates phosphorothioate.

[0162] In one embodiment, the invention features a method for modulating the expression of an influenza gene within a cell comprising: (a) synthesizing a siNA molecule of the invention, which can be chemically-modified or unmodified, wherein one of the siNA strands comprises a sequence complementary to RNA of the influenza gene; and (b) introducing the siNA molecule into a cell under conditions suitable to modulate (e.g., inhibit) the expression of the influenza gene in the cell.

[0163] In one embodiment, the invention features a method for modulating the expression of an influenza gene within a cell comprising: (a) synthesizing a siNA molecule of the invention, which can be chemically-modified or unmodified, wherein one of the siNA strands comprises a sequence complementary to RNA of the influenza gene and wherein the sense strand sequence of the siNA comprises a sequence identical or substantially similar to the sequence of the influenza RNA; and (b) introducing the siNA molecule into a cell under conditions suitable to modulate (e.g., inhibit) the expression of the influenza gene in the cell.

[0164] In another embodiment, the invention features a method for modulating the expression of more than one influenza gene within a cell comprising: (a) synthesizing siNA molecules of the invention, which can be chemically-modified or unmodified, wherein one of the siNA strands comprises a sequence complementary to RNA of the influenza genes; and (b) introducing the siNA molecules into a cell under conditions suitable to modulate (e.g., inhibit) the expression of the influenza genes in the cell.

[0165] In another embodiment, the invention features a method for modulating the expression of two or more influenza genes within a cell comprising: (a) synthesizing one or more siNA molecules of the invention, which can be chemically-modified or unmodified, wherein the siNA strands comprise sequences complementary to RNA of the influenza genes and wherein the sense strand sequences of the siNAs comprise sequences identical or substantially similar to the sequences of the influenza RNAs; and (b) introducing the siNA molecules into a cell under conditions suitable to modulate (e.g., inhibit) the expression of the influenza genes in the cell.

[0166] In another embodiment, the invention features a method for modulating the expression of more than one influenza gene within a cell comprising: (a) synthesizing a siNA molecule of the invention, which can be chemically-modified or unmodified, wherein one of the siNA strands comprises a sequence complementary to RNA of the influenza gene and wherein the sense strand sequence of the siNA comprises a sequence identical or substantially similar to the sequences of the influenza RNAs; and (b) introducing the siNA molecule into a cell under conditions suitable to modulate (e.g., inhibit) the expression of the influenza genes in the cell.

[0167] In another embodiment, the invention features a method for modulating the expression of an influenza gene within a cell comprising: (a) synthesizing a siNA molecule of the invention, which can be chemically-modified or unmodified, wherein one of the siNA strands comprises a sequence complementary to RNA of the influenza gene, wherein the sense strand sequence of the siNA comprises a sequence identical or substantially similar to the sequences of the influenza RNA; and (b) introducing the siNA molecule into a cell under conditions suitable to modulate (e.g., inhibit) the expression of the influenza gene in the cell.

[0168] In one embodiment, siNA molecules of the invention are used as reagents in ex vivo applications. For example, siNA reagents are introduced into tissue or cells that are transplanted into a subject for therapeutic effect. The cells and/or tissue can be derived from an organism or subject that later receives the explant, or can be derived from another organism or subject prior to transplantation. The siNA molecules can be used to modulate the expression of one or more genes in the cells or tissue, such that the cells or tissue obtain a desired phenotype or are able to perform a function when transplanted in vivo. In one embodiment, certain influenza cells from a patient are extracted. These extracted cells are contacted with siNAs influenzaing a specific nucleotide sequence within the cells under conditions suitable for uptake of the siNAs by these cells (e.g. using delivery reagents such as cationic lipids, liposomes and the like or using techniques such as electroporation to facilitate the delivery of siNAs into cells). The cells are then reintroduced back into the same patient or other patients.

[0169] In one embodiment, the invention features a method of modulating the expression of an influenza gene in a tissue explant comprising: (a) synthesizing a siNA molecule of the invention, which can be chemically-modified, wherein one of the siNA strands comprises a sequence complementary to RNA of the influenza gene; and (b) introducing the siNA molecule into a cell of the tissue explant derived from a particular organism under conditions suitable to modulate (e.g., inhibit) the expression of the influenza gene in the tissue explant. In another embodiment, the method further comprises introducing the tissue explant back into the organism the tissue was derived from or into another organism under conditions suitable to modulate (e.g., inhibit) the expression of the influenza gene in that organism.

[0170] In one embodiment, the invention features a method of modulating the expression of an influenza gene in a tissue explant comprising: (a) synthesizing a siNA molecule of the invention, which can be chemically-modified, wherein one of the siNA strands comprises a sequence complementary to RNA of the influenza gene and wherein the sense strand sequence of the siNA comprises a sequence identical or substantially similar to the sequence of the influenza RNA; and (b) introducing the siNA molecule into a cell of the tissue explant derived from a particular organism under conditions suitable to modulate (e.g., inhibit) the expression of the influenza gene in the tissue explant. In another embodiment, the method further comprises introducing the tissue explant back into the organism the tissue was derived from or into another organism under conditions suitable to modulate (e.g., inhibit) the expression of the influenza gene in that organism.

[0171] In another embodiment, the invention features a method of modulating the expression of more than one influenza gene in a tissue explant comprising: (a) synthesizing siNA molecules of the invention, which can be chemically-modified, wherein one of the siNA strands comprises a sequence complementary to RNA of the influenza genes; and (b) introducing the siNA molecules into a cell of the tissue explant derived from a particular organism under conditions suitable to modulate (e.g., inhibit) the expression of the influenza genes in the tissue explant. In another embodiment, the method further comprises introducing the tissue explant back into the organism the tissue was derived from or into another organism under conditions suitable to modulate (e.g., inhibit) the expression of the influenza genes in that organism.

[0172] In one embodiment, the invention features a method of modulating the expression of an influenza gene in a subject or organism comprising: (a) synthesizing a siNA molecule of the invention, which can be chemically-modified, wherein one of the siNA strands comprises a sequence complementary to RNA of the influenza gene; and (b) introducing the siNA molecule into the subject or organism under conditions suitable to modulate (e.g., inhibit) the expression of the influenza gene in the subject or organism. The level of influenza protein or RNA can be determined using various methods well-known in the art.

[0173] In another embodiment, the invention features a method of modulating the expression of more than one influenza gene in a subject or organism comprising: (a) synthesizing siNA molecules of the invention, which can be chemically-modified, wherein one of the siNA strands comprises a sequence complementary to RNA of the influenza genes; and (b) introducing the siNA molecules into the subject or organism under conditions suitable to modulate (e.g., inhibit) the expression of the influenza genes in the subject or organism. The level of influenza protein or RNA can be determined as is known in the art.

[0174] In one embodiment, the invention features a method for modulating the expression of an influenza gene within a cell comprising: (a) synthesizing a siNA molecule of the invention, which can be chemically-modified, wherein the siNA comprises a single stranded sequence having complementarity to RNA of the influenza gene; and (b) introducing the siNA molecule into a cell under conditions suitable to modulate (e.g., inhibit) the expression of the influenza gene in the cell.

[0175] In another embodiment, the invention features a method for modulating the expression of more than one influenza gene within a cell comprising: (a) synthesizing siNA molecules of the invention, which can be chemically-modified, wherein the siNA comprises a single stranded sequence having complementarity to RNA of the influenza gene; and (b) contacting the cell in vitro or in vivo with the siNA molecule under conditions suitable to modulate (e.g., inhibit) the expression of the influenza genes in the cell.

[0176] In one embodiment, the invention features a method of modulating the expression of an influenza gene in a tissue explant (e.g., a cochlea, skin, heart, liver, spleen, cornea, lung, stomach, kidney, vein, artery, hair, appendage, or limb transplant, or any other organ, tissue or cell as can be transplanted from one organism to another or back to the same organism from which the organ, tissue or cell is derived) comprising: (a) synthesizing a siNA molecule of the invention, which can be chemically-modified, wherein the siNA comprises a single stranded sequence having complementarity to RNA of the influenza gene; and (b) contacting a cell of the tissue explant derived from a particular subject or organism with the siNA molecule under conditions suitable to modulate (e.g., inhibit) the expression of the influenza gene in the tissue explant. In another embodiment, the method further comprises introducing the tissue explant back into the subject or organism the tissue was derived from or into another subject or organism under conditions suitable to modulate (e.g., inhibit) the expression of the influenza gene in that subject or organism.

[0177] In another embodiment, the invention features a method of modulating the expression of more than one influenza gene in a tissue explant (e.g., a cochlear, skin, heart, liver, spleen, cornea, lung, stomach, kidney, vein, artery, hair, appendage, or limb transplant, or any other organ, tissue or cell as can be transplanted from one organism to another or back to the same organism from which the organ, tissue or cell is derived) comprising: (a) synthesizing siNA molecules of the invention, which can be chemically-modified, wherein the siNA comprises a single stranded sequence having complementarity to RNA of the influenza gene; and (b) introducing the siNA molecules into a cell of the tissue explant derived from a particular subject or organism under conditions suitable to modulate (e.g., inhibit) the expression of the influenza genes in the tissue explant. In another embodiment, the method further comprises introducing the tissue explant back into the subject or organism the tissue was derived from or into another subject or organism under conditions suitable to modulate (e.g., inhibit) the expression of the influenza genes in that subject or organism.

[0178] In one embodiment, the invention features a method of modulating the expression of an influenza gene in a subject or organism comprising: (a) synthesizing a siNA molecule of the invention, which can be chemically-modified, wherein the siNA comprises a single stranded sequence having complementarity to RNA of the influenza gene; and (b) introducing the siNA molecule into the subject or organism under conditions suitable to modulate (e.g., inhibit) the expression of the influenza gene in the subject or organism.

[0179] In another embodiment, the invention features a method of modulating the expression of more than one influenza gene in a subject or organism comprising: (a) synthesizing siNA molecules of the invention, which can be chemically-modified, wherein the siNA comprises a single stranded sequence having complementarity to RNA of the influenza gene; and (b) introducing the siNA molecules into the subject or organism under conditions suitable to modulate (e.g., inhibit) the expression of the influenza genes in the subject or organism.

[0180] In one embodiment, the invention features a method of modulating the expression of an influenza gene in a subject or organism comprising contacting the subject or organism with a siNA molecule of the invention under conditions suitable to modulate (e.g., inhibit) the expression of the influenza gene in the subject or organism.

[0181] In one embodiment, the invention features a method for treating or preventing influenza virus infection or a disease, disorder, trait or condition related to influenza virus infection or influenza virus gene expression in a subject or organism comprising contacting the subject or organism with a siNA molecule of the invention under conditions suitable to modulate the expression of the influenze gene in the subject or organism. The reduction of gene expression and thus reduction in the level of the respective protein/RNA relieves, to some extent, the symptoms of the disease, disorder, trait or condition.

[0182] In one embodiment, the invention features a method for treating or preventing influenza virus infection in a subject, comprising administering to the subject Adefovir Dipivoxil in combination with a siNA molecule of the invention; wherein the Adefovir Dipivoxil and the siNA molecule are administered under conditions suitable for reducing or inhibiting the level of influenza virus in the subject compared to a subject not treated with the Adefovir Dipivoxil and the siNA molecule. In one embodiment, the siNA molecule or double stranded nucleic acid molecule of the invention is formulated as a composition described in U.S. Provisional patent application No. 60/678,531 and in related U.S. Provisional patent application No. 60/703,946, filed Jul. 29, 2005 (Vargeese et al.).

[0183] In one embodiment, the invention features a method for treating or preventing influenza virus infection in a subject, comprising administering to the subject an antiviral compound, such as amantadine, rimantadine, zanamivir, and/or oseltamivir phosphate, in combination with a siNA molecule of the invention; wherein the antiviral and the siNA are administered under conditions suitable for reducing or inhibiting the level of influenza virus in the subject compared to a subject not treated with antiviral and the siNA molecule. In one embodiment, the siNA molecule or double stranded nucleic acid molecule of the invention is formulated as a composition described in U.S. Provisional patent application No. 60/678,531 and in related U.S. Provisional patent application No. 60/703,946, filed Jul. 29, 2005 (Vargeese et al.).

[0184] In one embodiment, the invention features a method for treating or preventing influenza virus infection in a subject, comprising administering to the subject an antiviral compound, such as amantadine, rimantadine, zanamivir, and/or oseltamivir phosphate, in combination with a chemically synthesized double stranded nucleic acid molecule; wherein (a) the double stranded nucleic acid molecule comprises a sense strand and an antisense strand; (b) each strand of the double stranded nucleic acid molecule is 15 to 28 nucleotides in length; (c) at least 15 nucleotides of the sense strand are complementary to the antisense strand(d) the antisense strand of the double stranded nucleic acid molecule has complementarity to an influenza target RNA; and wherein the antiviral and the double stranded nucleic acid molecule are administered under conditions suitable for reducing or inhibiting the level of influenza virus in the subject compared to a subject not treated with the antiviral and the double stranded nucleic acid molecule. In one embodiment, the siNA molecule or double stranded nucleic acid molecule of the invention is formulated as a composition described in U.S. Provisional patent application No. 60/678,531 and in related U.S. Provisional patent application No. 60/703,946, filed Jul. 29, 2005 (Vargeese et al.).

[0185] In one embodiment, the invention features a composition comprising an antiviral compound, such as amantadine, rimantadine, zanamivir, and/or oseltamivir phosphate, and one or more double stranded nucleic acid molecules or siNA molecules of the invention in a phamaceutically acceptable carrier or diluent.

[0186] In any of the methods of treatment of the invention, the siNA can be administered to the subject as a course of treatment, for example administration at various time intervals, such as once per day over the course of treatment, once every two days over the course of treatment, once every three days over the course of treatment, once every four days over the course of treatment, once every five days over the course of treatment, once every six days over the course of treatment, once per week over the course of treatment, once every other week over the course of treatment, once per month over the course of treatment, etc. In one embodiment, the course of treatment is from about one to about 52 weeks or longer (e.g., indefinitely). In one embodiment, the course of treatment is from about one to about 48 months or longer (e.g., indefinitely).

[0187] In any of the methods of treatment of the invention, the siNA can be administered to the subject systemically as described herein or otherwise known in the art, either alone as a monotherapy or in combination with additional therapies as are known in the art. Systemic administration can include, for example, intravenous, subcutaneous, intramuscular, catheterization, nasopharangeal, pulmonary, transdermal, or gastrointestinal administration as is generally known in the art.

[0188] In one embodiment, in any of the methods of treatment or prevention of the invention, the siNA can be administered to the subject locally or to local tissues as described herein or otherwise known in the art, either alone as a monotherapy or in combination with additional therapies as are known in the art. Local administration can include, for example, aerosolization, catheterization, implantation, direct injection, dermal/transdermal application, stenting, ear/eye drops, or portal vein administration to relevant tissues, or any other local administration technique, method or procedure, as is generally known in the art.

[0189] The siNA molecules of the invention can be designed to down regulate or inhibit influenza gene expression and activity through RNAi targeting of a variety of nucleic acid molecules. In one embodiment, the siNA molecules of the invention are used to target various DNA corresponding to a target gene (e.g., host genes), for example via heterochromatic silencing or transcriptional inhibition. In one embodiment, the siNA molecules of the invention are used to target various RNAs corresponding to the influenza or host genome, for example via RNA target cleavage or translational inhibition. Non-limiting examples of such RNAs include messenger RNA (mRNA), non-coding RNA (ncRNA) or regulatory elements (see for example Mattick, 2005, Science, 309, 1527-1528 and Claverie, 2005, Science, 309, 1529-1530) which includes miRNA and other small RNAs, alternate RNA splice variants of target gene(s), post-transcriptionally modified RNA of target gene(s), pre-mRNA of target gene(s), and/or RNA templates. If alternate splicing produces a family of transcripts that are distinguished by usage of appropriate exons, the instant invention can be used to inhibit gene expression through the appropriate exons to specifically inhibit or to distinguish among the functions of gene family members. For example, a protein that contains an alternatively spliced transmembrane domain can be expressed in both membrane bound and secreted forms. Use of the invention to target the exon containing the transmembrane domain can be used to determine the functional consequences of pharmaceutical targeting of membrane bound as opposed to the secreted form of the protein. Non-limiting examples of applications of the invention relating to targeting these RNA molecules include therapeutic pharmaceutical applications, cosmetic applications, veterinary applications, pharmaceutical discovery applications, molecular diagnostic and gene function applications, and gene mapping, for example using single nucleotide polymorphism mapping with siNA molecules of the invention. Such applications can be implemented using known gene sequences or from partial sequences available from an expressed sequence tag (EST).

[0190] In another embodiment, the siNA molecules of the invention are used to target conserved sequences corresponding to a gene family or gene families (e.g., one or more influenza strains or serotypes) such as gene families having homologous or conserved sequences. As such, siNA molecules targeting multiple gene or RNA targets can provide increased therapeutic effect by targeting more than one gene involved in influenza infection (e.g., both viral and host genes), or by preventing escape mutants and viral resistance to treatment. In one embodiment, the invention features the targeting (cleavage or inhibition of expression or function) of more than one target gene sequence using a single siNA molecule, by targeting the conserved sequences of the targeted target gene.

[0191] In addition, siNA can be used to characterize pathways of gene function in a variety of applications. For example, the present invention can be used to inhibit the activity of target gene(s) in a pathway to determine the function of uncharacterized gene(s) in gene function analysis, mRNA function analysis, or translational analysis. The invention can be used to determine potential target gene pathways involved in various diseases and conditions toward pharmaceutical development. The invention can be used to understand pathways of gene expression involved in, for example, the progression and/or maintenance of hearing loss, deafness, tinnitus, movement or balance disorders, and any other diseases, traits, and conditions associated with target gene expression or activity in a subject or organism.

[0192] In one embodiment, siNA molecule(s) and/or methods of the invention are used to down regulate the expression of gene(s) that encode RNA referred to by Genbank Accession, for example, target genes encoding RNA sequence(s) referred to herein by Genbank Accession number, for example, Genbank Accession Nos. shown in U.S. Ser. No. 10/923,536 and U.S. Ser. No. 10/923536, both incorporated by reference herein or by Genbank Accession Nos. shown in Table I herein.

[0193] In one embodiment, the invention features a method comprising: (a) generating a library of siNA constructs having a predetermined complexity; and (b) assaying the siNA constructs of (a) above, under conditions suitable to determine RNAi target sites within the target RNA sequence. In one embodiment, the siNA molecules of (a) have strands of a fixed length, for example, about 23 nucleotides in length. In another embodiment, the siNA molecules of (a) are of differing length, for example having strands of about 15 to about 30 (e.g., about 15, 16, 17, 18, 19, 20, 21, 22, 23, 24, 25, 26, 27, 28, 29, or 30) nucleotides in length. In one embodiment, the assay can comprise a reconstituted in vitro siNA assay as described herein. In another embodiment, the assay can comprise a cell culture system in which target RNA is expressed. In another embodiment, fragments of target RNA are analyzed for detectable levels of cleavage, for example by gel electrophoresis, northern blot analysis, or RNAse protection assays, to determine the most suitable target site(s) within the target RNA sequence. The target RNA sequence can be obtained as is known in the art, for example, by cloning and/or transcription for in vitro systems, and by cellular expression in in vivo systems.

[0194] In one embodiment, the invention features a method comprising: (a) generating a randomized library of siNA constructs having a predetermined complexity, such as of 4^{N}, where N represents the number of base paired nucleotides in each of the siNA construct strands (eg. for a siNA construct having 21 nucleotide sense and antisense strands with 19 base pairs, the complexity would be 4¹⁹); and (b) assaying the siNA constructs of (a) above, under conditions suitable to determine RNAi target sites within the target target RNA sequence. In another embodiment, the siNA molecules of (a) have strands of a fixed length, for example about 23 nucleotides in length. In yet another embodiment, the siNA molecules of (a) are of differing length, for example having strands of about 15 to about 30 (e.g., about 15, 16, 17, 18, 19, 20, 21, 22, 23, 24, 25, 26, 27, 28, 29, or 30) nucleotides in length. In one embodiment, the assay can comprise a reconstituted in vitro siNA assay as described in Example 6 herein. In another embodiment, the assay can comprise a cell culture system in which target RNA is expressed. In another embodiment, fragments of target RNA are analyzed for detectable levels of cleavage, for example, by gel electrophoresis, northern blot analysis, or RNAse protection assays, to determine the most suitable target site(s) within the target target RNA sequence. The target target RNA sequence can be obtained as is known in the art, for example, by cloning and/or transcription for in vitro systems, and by cellular expression in in vivo systems.

[0195] In another embodiment, the invention features a method comprising: (a) analyzing the sequence of a RNA target encoded by a target gene; (b) synthesizing one or more sets of siNA molecules having sequence complementary to one or more regions of the RNA of (a); and (c) assaying the siNA molecules of (b) under conditions suitable to determine RNAi targets within the target RNA sequence. In one embodiment, the siNA molecules of (b) have strands of a fixed length, for example about 23 nucleotides in length. In another embodiment, the siNA molecules of (b) are of differing length, for example having strands of about 15 to about 30 (e.g., about 15, 16, 17, 18, 19, 20, 21, 22, 23, 24, 25, 26, 27, 28, 29, or 30) nucleotides in length. In one embodiment, the assay can comprise a reconstituted in vitro siNA assay as described herein. In another embodiment, the assay can comprise a cell culture system in which target RNA is expressed. Fragments of target RNA are analyzed for detectable levels of cleavage, for example by gel electrophoresis, northern blot analysis, or RNAse protection assays, to determine the most suitable target site(s) within the target RNA sequence. The target RNA sequence can be obtained as is known in the art, for example, by cloning and/or transcription for in vitro systems, and by expression in in vivo systems.

[0196] By “target site” is meant a sequence within a target RNA that is “targeted” for cleavage mediated by a siNA construct which contains sequences within its antisense region that are complementary to the target sequence.

[0197] By “detectable level of cleavage” is meant cleavage of target RNA (and formation of cleaved product RNAs) to an extent sufficient to discern cleavage products above the background of RNAs produced by random degradation of the target RNA. Production of cleavage products from 1-5% of the target RNA is sufficient to detect above the background for most methods of detection.

[0198] In one embodiment, the invention features a composition comprising a siNA molecule of the invention, which can be chemically-modified, in a pharmaceutically acceptable carrier or diluent. In another embodiment, the invention features a pharmaceutical composition comprising siNA molecules of the invention, which can be chemically-modified, targeting one or more genes in a pharmaceutically acceptable carrier or diluent. In another embodiment, the invention features a method for diagnosing a disease, trait, or condition in a subject comprising administering to the subject a composition of the invention under conditions suitable for the diagnosis of the disease, trait, or condition in the subject. In another embodiment, the invention features a method for treating or preventing a disease, trait, or condition, such as hearing loss, deafness, tinnitus, and/or motion and balance disorders in a subject, comprising administering to the subject a composition of the invention under conditions suitable for the treatment or prevention of the disease, trait, or condition in the subject, alone or in conjunction with one or more other therapeutic compounds.

[0199] In another embodiment, the invention features a method for validating a target gene target, comprising: (a) synthesizing a siNA molecule of the invention, which can be chemically-modified, wherein one of the siNA strands includes a sequence complementary to RNA of a target gene; (b) introducing the siNA molecule into a cell, tissue, subject, or organism under conditions suitable for modulating expression of the target gene in the cell, tissue, subject, or organism; and (c) determining the function of the gene by assaying for any phenotypic change in the cell, tissue, subject, or organism.

[0200] In another embodiment, the invention features a method for validating a target comprising: (a) synthesizing a siNA molecule of the invention, which can be chemically-modified, wherein one of the siNA strands includes a sequence complementary to RNA of a target gene; (b) introducing the siNA molecule into a biological system under conditions suitable for modulating expression of the target gene in the biological system; and (c) determining the function of the gene by assaying for any phenotypic change in the biological system.

[0201] By “biological system” is meant, material, in a purified or unpurified form, from biological sources, including but not limited to human or animal, wherein the system comprises the components required for RNAi activity. The term “biological system” includes, for example, a cell, tissue, subject, or organism, or extract thereof. The term biological system also includes reconstituted RNAi systems that can be used in an in vitro setting.

[0202] By “phenotypic change” is meant any detectable change to a cell that occurs in response to contact or treatment with a nucleic acid molecule of the invention (e.g., siNA). Such detectable changes include, but are not limited to, changes in shape, size, proliferation, motility, protein expression or RNA expression or other physical or chemical changes as can be assayed by methods known in the art. The detectable change can also include expression of reporter genes/molecules such as Green Florescent Protein (GFP) or various tags that are used to identify an expressed protein or any other cellular component that can be assayed.

[0203] In one embodiment, the invention features a kit containing a siNA molecule of the invention, which can be chemically-modified, that can be used to modulate the expression of a target gene in a biological system, including, for example, in a cell, tissue, subject, or organism. In another embodiment, the invention features a kit containing more than one siNA molecule of the invention, which can be chemically-modified, that can be used to modulate the expression of more than one target gene in a biological system, including, for example, in a cell, tissue, subject, or organism.

[0204] In one embodiment, the invention features a cell containing one or more siNA molecules of the invention, which can be chemically-modified. In another embodiment, the cell containing a siNA molecule of the invention is a mammalian cell. In yet another embodiment, the cell containing a siNA molecule of the invention is a human cell.

[0205] In one embodiment, the synthesis of a siNA molecule of the invention, which can be chemically-modified, comprises: (a) synthesis of two complementary strands of the siNA molecule; (b) annealing the two complementary strands together under conditions suitable to obtain a double-stranded siNA molecule. In another embodiment, synthesis of the two complementary strands of the siNA molecule is by solid phase oligonucleotide synthesis. In yet another embodiment, synthesis of the two complementary strands of the siNA molecule is by solid phase tandem oligonucleotide synthesis.

[0206] In one embodiment, the invention features a method for synthesizing a siNA duplex molecule comprising: (a) synthesizing a first oligonucleotide sequence strand of the siNA molecule, wherein the first oligonucleotide sequence strand comprises a cleavable linker molecule that can be used as a scaffold for the synthesis of the second oligonucleotide sequence strand of the siNA; (b) synthesizing the second oligonucleotide sequence strand of siNA on the scaffold of the first oligonucleotide sequence strand, wherein the second oligonucleotide sequence strand further comprises a chemical moiety than can be used to purify the siNA duplex; (c) cleaving the linker molecule of (a) under conditions suitable for the two siNA oligonucleotide strands to hybridize and form a stable duplex; and (d) purifying the siNA duplex utilizing the chemical moiety of the second oligonucleotide sequence strand. In one embodiment, cleavage of the linker molecule in (c) above takes place during deprotection of the oligonucleotide, for example, under hydrolysis conditions using an alkylamine base such as methylamine. In one embodiment, the method of synthesis comprises solid phase synthesis on a solid support such as controlled pore glass (CPG) or polystyrene, wherein the first sequence of (a) is synthesized on a cleavable linker, such as a succinyl linker, using the solid support as a scaffold. The cleavable linker in (a) used as a scaffold for synthesizing the second strand can comprise similar reactivity as the solid support derivatized linker, such that cleavage of the solid support derivatized linker and the cleavable linker of (a) takes place concomitantly. In another embodiment, the chemical moiety of (b) that can be used to isolate the attached oligonucleotide sequence comprises a trityl group, for example a dimethoxytrityl group, which can be employed in a trityl-on synthesis strategy as described herein. In yet another embodiment, the chemical moiety, such as a dimethoxytrityl group, is removed during purification, for example, using acidic conditions.

[0207] In a further embodiment, the method for siNA synthesis is a solution phase synthesis or hybrid phase synthesis wherein both strands of the siNA duplex are synthesized in tandem using a cleavable linker attached to the first sequence which acts a scaffold for synthesis of the second sequence. Cleavage of the linker under conditions suitable for hybridization of the separate siNA sequence strands results in formation of the double-stranded siNA molecule.

[0208] In another embodiment, the invention features a method for synthesizing a siNA duplex molecule comprising: (a) synthesizing one oligonucleotide sequence strand of the siNA molecule, wherein the sequence comprises a cleavable linker molecule that can be used as a scaffold for the synthesis of another oligonucleotide sequence; (b) synthesizing a second oligonucleotide sequence having complementarity to the first sequence strand on the scaffold of (a), wherein the second sequence comprises the other strand of the double-stranded siNA molecule and wherein the second sequence further comprises a chemical moiety than can be used to isolate the attached oligonucleotide sequence; (c) purifying the product of (b) utilizing the chemical moiety of the second oligonucleotide sequence strand under conditions suitable for isolating the full-length sequence comprising both siNA oligonucleotide strands connected by the cleavable linker and under conditions suitable for the two siNA oligonucleotide strands to hybridize and form a stable duplex. In one embodiment, cleavage of the linker molecule in (c) above takes place during deprotection of the oligonucleotide, for example, under hydrolysis conditions. In another embodiment, cleavage of the linker molecule in (c) above takes place after deprotection of the oligonucleotide. In another embodiment, the method of synthesis comprises solid phase synthesis on a solid support such as controlled pore glass (CPG) or polystyrene, wherein the first sequence of (a) is synthesized on a cleavable linker, such as a succinyl linker, using the solid support as a scaffold. The cleavable linker in (a) used as a scaffold for synthesizing the second strand can comprise similar reactivity or differing reactivity as the solid support derivatized linker, such that cleavage of the solid support derivatized linker and the cleavable linker of (a) takes place either concomitantly or sequentially. In one embodiment, the chemical moiety of (b) that can be used to isolate the attached oligonucleotide sequence comprises a trityl group, for example a dimethoxytrityl group.

[0209] In another embodiment, the invention features a method for making a double-stranded siNA molecule in a single synthetic process comprising: (a) synthesizing an oligonucleotide having a first and a second sequence, wherein the first sequence is complementary to the second sequence, and the first oligonucleotide sequence is linked to the second sequence via a cleavable linker, and wherein a terminal 5′-protecting group, for example, a 5′-O-dimethoxytrityl group (5′-O-DMT) remains on the oligonucleotide having the second sequence; (b) deprotecting the oligonucleotide whereby the deprotection results in the cleavage of the linker joining the two oligonucleotide sequences; and (c) purifying the product of (b) under conditions suitable for isolating the double-stranded siNA molecule, for example using a trityl-on synthesis strategy as described herein.

[0210] In another embodiment, the method of synthesis of siNA molecules of the invention comprises the teachings of Scaringe et al., U.S. Pat. Nos. 5,889,136; 6,008,400; and 6,111,086, incorporated by reference herein in their entirety.

[0211] In one embodiment, the invention features siNA constructs that mediate RNAi against a target polynucleotide (e.g., RNA or DNA target), wherein the siNA construct comprises one or more chemical modifications, for example, one or more chemical modifications having any of Formulae I-VII or any combination thereof that increases the nuclease resistance of the siNA construct.

[0212] In another embodiment, the invention features a method for generating siNA molecules with increased nuclease resistance comprising (a) introducing nucleotides having any of Formula I-VII or any combination thereof into a siNA molecule, and (b) assaying the siNA molecule of step (a) under conditions suitable for isolating siNA molecules having increased nuclease resistance.

[0213] In another embodiment, the invention features a method for generating siNA molecules with improved toxicologic profiles (e.g., having attenuated or no immunstimulatory properties) comprising (a) introducing nucleotides having any of Formula I-VII (e.g., siNA motifs referred to in Table IV) or any combination thereof into a siNA molecule, and (b) assaying the siNA molecule of step (a) under conditions suitable for isolating siNA molecules having improved toxicologic profiles.

[0214] In another embodiment, the invention features a method for generating siNA formulations with improved toxicologic profiles (e.g., having attenuated or no immunstimulatory properties) comprising (a) generating a siNA formulation comprising a siNA molecule of the invention and a delivery vehicle or delivery particle as described herein or as otherwise known in the art, and (b) assaying the siNA formualtion of step (a) under conditions suitable for isolating siNA formulations having improved toxicologic profiles.

[0215] In another embodiment, the invention features a method for generating siNA molecules that do not stimulate an interferon response (e.g., no interferon response or attenuated interferon response) in a cell, subject, or organism, comprising (a) introducing nucleotides having any of Formula I-VII (e.g., siNA motifs referred to in Table IV) or any combination thereof into a siNA molecule, and (b) assaying the siNA molecule of step (a) under conditions suitable for isolating siNA molecules that do not stimulate an interferon response.

[0216] In another embodiment, the invention features a method for generating siNA formulations that do not stimulate an interferon response (e.g., no interferon response or attenuated interferon response) in a cell, subject, or organism, comprising (a) generating a siNA formulation comprising a siNA molecule of the invention and a delivery vehicle or delivery particle as described herein or as otherwise known in the art, and (b) assaying the siNA formualtion of step (a) under conditions suitable for isolating siNA formulations that do not stimulate an interferon response. In one embodiment, the interferon comprises interferon alpha.

[0217] In another embodiment, the invention features a method for generating siNA molecules that do not stimulate an inflammatory or proinflammatory cytokine response (e.g., no cytokine response or attenuated cytokine response) in a cell, subject, or organism, comprising (a) introducing nucleotides having any of Formula I-VII (e.g., siNA motifs referred to in Table IV) or any combination thereof into a siNA molecule, and (b) assaying the siNA molecule of step (a) under conditions suitable for isolating siNA molecules that do not stimulate a cytokine response. In one embodiment, the cytokine comprises an interleukin such as interleukin-6 (IL-6) and/or tumor necrosis alpha (TNF-α).

[0218] In another embodiment, the invention features a method for generating siNA formulations that do not stimulate an inflammatory or proinflammatory cytokine response (e.g., no cytokine response or attenuated cytokine response) in a cell, subject, or organism, comprising (a) generating a siNA formulation comprising a siNA molecule of the invention and a delivery vehicle or delivery particle as described herein or as otherwise known in the art, and (b) assaying the siNA formualtion of step (a) under conditions suitable for isolating siNA formulations that do not stimulate a cytokine response. In one embodiment, the cytokine comprises an interleukin such as interleukin-6 (IL-6) and/or tumor necrosis alpha (TNF-α).

[0219] In another embodiment, the invention features a method for generating siNA molecules that do not stimulate Toll-like Receptor (TLR) response (e.g., no TLR response or attenuated TLR response) in a cell, subject, or organism, comprising (a) introducing nucleotides having any of Formula I-VII (e.g., siNA motifs referred to in Table IV) or any combination thereof into a siNA molecule, and (b) assaying the siNA molecule of step (a) under conditions suitable for isolating siNA molecules that do not stimulate a TLR response. In one embodiment, the TLR comprises TLR3, TLR7, TLR8 and/or TLR9.

[0220] In another embodiment, the invention features a method for generating siNA formulations that do not stimulate a Toll-like Receptor (TLR) response (e.g., no TLR response or attenuated TLR response) in a cell, subject, or organism, comprising (a) generating a siNA formulation comprising a siNA molecule of the invention and a delivery vehicle or delivery particle as described herein or as otherwise known in the art, and (b) assaying the siNA formualtion of step (a) under conditions suitable for isolating siNA formulations that do not stimulate a TLR response. In one embodiment, the TLR comprises TLR3, TLR7, TLR8 and/or TLR9.

[0221] In one embodiment, the invention features a chemically synthesized double stranded short interfering nucleic acid (siNA) molecule that directs cleavage of a target RNA via RNA interference (RNAi), wherein: (a) each strand of said siNA molecule is about 18 to about 38 nucleotides in length; (b) one strand of said siNA molecule comprises nucleotide sequence having sufficient complementarity to said target RNA for the siNA molecule to direct cleavage of the target RNA via RNA interference; and (c) wherein the nucleotide positions within said siNA molecule are chemically modified to reduce the immunostimulatory properties of the siNA molecule to a level below that of a corresponding unmodified siRNA molecule. Such siNA molecules are said to have an improved toxicologic profile compared to an unmodified or minimally modified siNA.

[0222] By “improved toxicologic profile”, is meant that the chemically modified or formulated siNA construct exhibits decreased toxicity in a cell, subject, or organism compared to an unmodified or unformulated siNA, or siNA molecule having fewer modifications or modifications that are less effective in imparting improved toxicology. In a non-limiting example, siNA molecules and formulations with improved toxicologic profiles are associated with reduced immunostimulatory properties, such as a reduced, decreased or attenuated immunostimulatory response in a cell, subject, or organism compared to an unmodified or unformulated siNA, or siNA molecule having fewer modifications or modifications that are less effective in imparting improved toxicology. Such an improved toxicologic profile is characterized by abrogated or reduced immunostimulation, such as reduction or abrogation of induction of interferons (e.g., interferon alpha), inflammatory cytokines (e.g., interleukins such as IL-6, and/or TNF-alpha), and/or toll like receptors (e.g., TLR-3, TLR-7, TLR-8, and/or TLR-9). In one embodiment, a siNA molecule or formulation with an improved toxicological profile comprises no ribonucleotides. In one embodiment, a siNA molecule or formulation with an improved toxicological profile comprises less than 5 ribonucleotides (e.g., 1, 2, 3, or 4 ribonucleotides). In one embodiment, a siNA molecule or formulation with an improved toxicological profile comprises Stab 7, Stab 8, Stab 11, Stab 12, Stab 13, Stab 16, Stab 17, Stab 18, Stab 19, Stab 20, Stab 23, Stab 24, Stab 25, Stab 26, Stab 27, Stab 28, Stab 29, Stab 30, Stab 31, Stab 32, Stab 33, Stab 34 or any combination thereof (see Table IV). Herein, numeric Stab chemistries include both 2′-fluoro and 2′-OCF3 versions of the chemistries shown in Table IV. For example, “Stab 7/8” refers to both Stab 7/8 and Stab 7F/8F etc. In one embodiment, a siNA molecule or formulation with an improved toxicological profile comprises a siNA molecule of the invention and a formulation as described in United States Patent Application Publication No. 20030077829 and provisional patent application No. 60/703,946, both incorporated by reference herein in their entirety including the drawings.

[0223] In one embodiment, the level of immunostimulatory response associated with a given siNA molecule can be measured as is described herein or as is otherwise known in the art, for example by determining the level of PKR/interferon response, proliferation, B-cell activation, and/or cytokine production in assays to quantitate the immunostimulatory response of particular siNA molecules (see, for example, Leifer et al., 2003, J Immunother. 26, 313-9; and U.S. Patent No. 5,968,909, incorporated in its entirety by reference). In one embodiment, the reduced immunostimulatory response is between about 10% and about 100% compared to an unmodified or minimally modified siRNA molecule, e.g., about 10%, 20%, 30%, 40%, 50%, 60%, 70%, 80%, 90% or 100% reduced immunostimulatory response. In one embodiment, the immunostimulatory response associated with a siNA molecule can be modulated by the degree of chemical modification. For example, a siNA molecule having between about 10% and about 100%, e.g., about 10%, 20%, 30%, 40%, 50%, 60%, 70%, 80%, 90% or 100% of the nucleotide positions in the siNA molecule modified can be selected to have a corresponding degree of immunostimulatory properties as described herein.

[0224] In one embodiment, the degree of reduced immunostimulatory response is selected for optimized RNAi activity. For example, retaining a certain degree of immunostimulation can be preferred to treat viral infection, where less than 100% reduction in immunostimulation may be preferred for maximal antiviral activity (e.g., about 10%, 20%, 30%, 40%, 50%, 60%, 70%, 80%, or 90% reduction in immunostimulation) whereas the inhibition of expression of an endogenous gene target may be preferred with siNA molecules that posess minimal immunostimulatory properties to prevent non-specific toxicity or off target effects (e.g., about 90% to about 100% reduction in immunostimulation).

[0225] In one embodiment, the invention features a chemically synthesized double stranded siNA molecule that directs cleavage of a target RNA via RNA interference (RNAi), wherein (a) each strand of said siNA molecule is about 18 to about 38 nucleotides in length; (b) one strand of said siNA molecule comprises nucleotide sequence having sufficient complementarity to said target RNA for the siNA molecule to direct cleavage of the target RNA via RNA interference; and (c) wherein one or more nucleotides of said siNA molecule are chemically modified to reduce the immunostimulatory properties of the siNA molecule to a level below that of a corresponding unmodified siNA molecule. In one embodiment, each starnd comprises at least about 18 nucleotides that are complementary to the nucleotides of the other strand.

[0226] In another embodiment, the siNA molecule comprising modified nucleotides to reduce the immunostimulatory properties of the siNA molecule comprises an antisense region having nucleotide sequence that is complemetary to a nucleotide sequence of a target gene or a protion thereof and further comprises a sense region, wherein said sense region comprises a nucleotide sequence substantially similar to the nucleotide sequence of said target gene or protion thereof. In one embodiment thereof, the antisense region and the sense region comprise about 18 to about 38 nucleotides, wherein said antisense region comprises at least about 18 nucleotides that are complementary to nucleotides of the sense region. In one embodiment thereof, the pyrimidine nucleotides in the sense region are 2′-O-methyl pyrimidine nucleotides. In another embodiment thereof, the purine nucleotides in the sense region are 2′-deoxy purine nucleotides. In yet another embodiment thereof, the pyrimidine nucleotides present in the sense region are 2′-deoxy-2′-fluoro pyrimidine nucleotides. In another embodiment thereof, the pyrimidine nucleotides of said antisense region are 2′-deoxy-2′-fluoro pyrimidine nucleotides. In yet another embodiment thereof, the purine nucleotides of said antisense region are 2′-O-methyl purine nucleotides. In still another embodiment thereof, the purine nucleotides present in said antisense region comprise 2′-deoxypurine nucleotides. In another embodiment, the antisense region comprises a phosphorothioate internucleotide linkage at the 3′ end of said antisense region. In another embodiment, the antisense region comprises a glyceryl modification at a 3′ end of said antisense region.

[0227] In other embodiments, the siNA molecule comprisisng modified nucleotides to reduce the immunostimulatory properties of the siNA molecule can comprise any of the structural features of siNA molecules described herein. In other embodiments, the siNA molecule comprising modified nucleotides to reduce the immunostimulatory properties of the siNA molecule can comprise any of the chemical modifications of siNA molecules described herein.

[0228] In one embodiment, the invention features a method for generating a chemically synthesized double stranded siNA molecule having chemically modified nucleotides to reduce the immunostimulatory properties of the siNA molecule, comprising (a) introducing one or more modified nucleotides in the siNA molecule, and (b) assaying the siNA molecule of step (a) under conditions suitable for isolating an siNA molecule having reduced immunostimulatory properties compared to a corresponding siNA molecule having unmodified nucleotides. Each strand of the siNA molecule is about 18 to about 38 nucleotides in length. One strand of the siNA molecule comprises nucleotide sequence having sufficient complementarity to the target RNA for the siNA molecule to direct cleavage of the target RNA via RNA interference. In one embodiment, the reduced immunostimulatory properties comprise an abrogated or reduced induction of inflammatory or proinflammatory cytokines, such as interleukin-6 (IL-6) or tumor necrosis alpha (TNF-α), in response to the siNA being introduced in a cell, tissue, or organism. In another embodiment, the reduced immunostimulatory properties comprise an abrogated or reduced induction of Toll Like Receptors (TLRs), such as TLR3, TLR7, TLR8 or TLR9, in response to the siNA being introduced in a cell, tissue, or organism. In another embodiment, the reduced immunostimulatory properties comprise an abrogated or reduced induction of interferons, such as interferon alpha, in response to the siNA being introduced in a cell, tissue, or organism.

[0229] In one embodiment, the invention features siNA constructs that mediate RNAi against a target polynucleotide (e.g., influenza or host RNA or DNA), wherein the siNA construct comprises one or more chemical modifications described herein that modulates the binding affinity between the sense and antisense strands of the siNA construct.

[0230] In another embodiment, the invention features a method for generating siNA molecules with increased binding affinity between the sense and antisense strands of the siNA molecule comprising (a) introducing nucleotides having any of Formula I-VII or any combination thereof into a siNA molecule, and (b) assaying the siNA molecule of step (a) under conditions suitable for isolating siNA molecules having increased binding affinity between the sense and antisense strands of the siNA molecule.

[0231] In one embodiment, the invention features siNA constructs that mediate RNAi against a target polynucleotide (e.g., influenza or host RNA or DNA), wherein the siNA construct comprises one or more chemical modifications described herein that modulates the binding affinity between the antisense strand of the siNA construct and a complementary target RNA sequence within a cell.

[0232] In one embodiment, the invention features siNA constructs that mediate RNAi against a target polynucleotide (e.g., influenza or host RNA or DNA), wherein the siNA construct comprises one or more chemical modifications described herein that modulates the binding affinity between the antisense strand of the siNA construct and a complementary target DNA sequence within a cell.

[0233] In another embodiment, the invention features a method for generating siNA molecules with increased binding affinity between the antisense strand of the siNA molecule and a complementary target RNA sequence comprising (a) introducing nucleotides having any of Formula I-VII or any combination thereof into a siNA molecule, and (b) assaying the siNA molecule of step (a) under conditions suitable for isolating siNA molecules having increased binding affinity between the antisense strand of the siNA molecule and a complementary target RNA sequence.

[0234] In another embodiment, the invention features a method for generating siNA molecules with increased binding affinity between the antisense strand of the siNA molecule and a complementary target DNA sequence comprising (a) introducing nucleotides having any of Formula I-VII or any combination thereof into a siNA molecule, and (b) assaying the siNA molecule of step (a) under conditions suitable for isolating siNA molecules having increased binding affinity between the antisense strand of the siNA molecule and a complementary target DNA sequence.

[0235] In one embodiment, the invention features siNA constructs that mediate RNAi against a target polynucleotide, wherein the siNA construct comprises one or more chemical modifications described herein that modulate the polymerase activity of a cellular polymerase capable of generating additional endogenous siNA molecules having sequence homology to the chemically-modified siNA construct.

[0236] In another embodiment, the invention features a method for generating siNA molecules capable of mediating increased polymerase activity of a cellular polymerase capable of generating additional endogenous siNA molecules having sequence homology to a chemically-modified siNA molecule comprising (a) introducing nucleotides having any of Formula I-VII or any combination thereof into a siNA molecule, and (b) assaying the siNA molecule of step (a) under conditions suitable for isolating siNA molecules capable of mediating increased polymerase activity of a cellular polymerase capable of generating additional endogenous siNA molecules having sequence homology to the chemically-modified siNA molecule.

[0237] In one embodiment, the invention features chemically-modified siNA constructs that mediate RNAi against a target polynucleotide in a cell, wherein the chemical modifications do not significantly effect the interaction of siNA with a target RNA molecule, DNA molecule and/or proteins or other factors that are essential for RNAi in a manner that would decrease the efficacy of RNAi mediated by such siNA constructs.

[0238] In another embodiment, the invention features a method for generating siNA molecules with improved RNAi specificity against polynucleotide targets comprising (a) introducing nucleotides having any of Formula I-VII or any combination thereof into a siNA molecule, and (b) assaying the siNA molecule of step (a) under conditions suitable for isolating siNA molecules having improved RNAi specificity. In one embodiment, improved specificity comprises having reduced off target effects compared to an unmodified siNA molecule. For example, introduction of terminal cap moieties at the 3′-end, 5′-end, or both 3′ and 5′-ends of the sense strand or region of a siNA molecule of the invention can direct the siNA to have improved specificity by preventing the sense strand or sense region from acting as a template for RNAi activity against a corresponding target having complementarity to the sense strand or sense region.

[0239] In another embodiment, the invention features a method for generating siNA molecules with improved RNAi activity against a target polynucleotide (e.g., influenza or host RNA or DNA) comprising (a) introducing nucleotides having any of Formula I-VII or any combination thereof into a siNA molecule, and (b) assaying the siNA molecule of step (a) under conditions suitable for isolating siNA molecules having improved RNAi activity.

[0240] In yet another embodiment, the invention features a method for generating siNA molecules with improved RNAi activity against a target RNA comprising (a) introducing nucleotides having any of Formula I-VII or any combination thereof into a siNA molecule, and (b) assaying the siNA molecule of step (a) under conditions suitable for isolating siNA molecules having improved RNAi activity against the target RNA.

[0241] In yet another embodiment, the invention features a method for generating siNA molecules with improved RNAi activity against a target DNA comprising (a) introducing nucleotides having any of Formula I-VII or any combination thereof into a siNA molecule, and (b) assaying the siNA molecule of step (a) under conditions suitable for isolating siNA molecules having improved RNAi activity against the target DNA.

[0242] In one embodiment, the invention features siNA constructs that mediate RNAi against a target polynucleotide (e.g., influenza or host RNA or DNA), wherein the siNA construct comprises one or more chemical modifications described herein that modulates the cellular uptake of the siNA construct, such as cholesterol conjugation of the siNA.

[0243] In another embodiment, the invention features a method for generating siNA molecules against a target polynucleotide (e.g., influenza or host RNA or DNA) with improved cellular uptake comprising (a) introducing nucleotides having any of Formula I-VII or any combination thereof into a siNA molecule, and (b) assaying the siNA molecule of step (a) under conditions suitable for isolating siNA molecules having improved cellular uptake.

[0244] In one embodiment, the invention features siNA constructs that mediate RNAi against a target polynucleotide (e.g., influenza or host RNA or DNA), wherein the siNA construct comprises one or more chemical modifications described herein that increases the bioavailability of the siNA construct, for example, by attaching polymeric conjugates such as polyethyleneglycol or equivalent conjugates that improve the pharmacokinetics of the siNA construct, or by attaching conjugates that target specific tissue types or cell types in vivo. Non-limiting examples of such conjugates are described in Vargeese et al., U.S. Ser. No. 10/201,394 incorporated by reference herein.

[0245] In one embodiment, the invention features a method for generating siNA molecules of the invention with improved bioavailability comprising (a) introducing a conjugate into the structure of a siNA molecule, and (b) assaying the siNA molecule of step (a) under conditions suitable for isolating siNA molecules having improved bioavailability. Such conjugates can include ligands for cellular receptors, such as peptides derived from naturally occurring protein ligands; protein localization sequences, including cellular ZIP code sequences; antibodies; nucleic acid aptamers; vitamins and other co-factors, such as folate and N-acetylgalactosamine; polymers, such as polyethyleneglycol (PEG); phospholipids; cholesterol; cholesterol derivatives, polyamines, such as spermine or spermidine; and others.

[0246] In one embodiment, the invention features a double stranded short interfering nucleic acid (siNA) molecule that comprises a first nucleotide sequence complementary to a target RNA sequence or a portion thereof (e.g., influenza or host RNA), and a second sequence having complementarity to said first sequence, wherein said second sequence is chemically modified in a manner that it can no longer act as a guide sequence for efficiently mediating RNA interference and/or be recognized by cellular proteins that facilitate RNAi. In one embodiment, the first nucleotide sequence of the siNA is chemically modified as described herein. In one embodiment, the first nucleotide sequence of the siNA is not modified (e.g., is all RNA).

[0247] In one embodiment, the invention features a double stranded short interfering nucleic acid (siNA) molecule that comprises a first nucleotide sequence complementary to a target RNA sequence or a portion thereof (e.g., influenza or host RNA), and a second sequence having complementarity to said first sequence, wherein the second sequence is designed or modified in a manner that prevents its entry into the RNAi pathway as a guide sequence or as a sequence that is complementary to a target nucleic acid (e.g., RNA) sequence. In one embodiment, the first nucleotide sequence of the siNA is chemically modified as described herein. In one embodiment, the first nucleotide sequence of the siNA is not modified (e.g., is all RNA). Such design or modifications are expected to enhance the activity of siNA and/or improve the specificity of siNA molecules of the invention. These modifications are also expected to minimize any off-target effects and/or associated toxicity.

[0248] In one embodiment, the invention features a double stranded short interfering nucleic acid (siNA) molecule that comprises a first nucleotide sequence complementary to a target RNA sequence or a portion thereof (e.g., influenza or host RNA), and a second sequence having complementarity to said first sequence, wherein said second sequence is incapable of acting as a guide sequence for mediating RNA interference. In one embodiment, the first nucleotide sequence of the siNA is chemically modified as described herein. In one embodiment, the first nucleotide sequence of the siNA is not modified (e.g., is all RNA).

[0249] In one embodiment, the invention features a double stranded short interfering nucleic acid (siNA) molecule that comprises a first nucleotide sequence complementary to a target RNA sequence or a portion thereof (e.g., influenza or host RNA), and a second sequence having complementarity to said first sequence, wherein said second sequence does not have a terminal 5′-hydroxyl (5′-OH) or 5′-phosphate group.

[0250] In one embodiment, the invention features a double stranded short interfering nucleic acid (siNA) molecule that comprises a first nucleotide sequence complementary to a target RNA sequence or a portion thereof (e.g., influenza or host RNA), and a second sequence having complementarity to said first sequence, wherein said second sequence comprises a terminal cap moiety at the 5′-end of said second sequence. In one embodiment, the terminal cap moiety comprises an inverted abasic, inverted deoxy abasic, inverted nucleotide moiety, a group shown in FIG. 10, an alkyl or cycloalkyl group, a heterocycle, or any other group that prevents RNAi activity in which the second sequence serves as a guide sequence or template for RNAi.

[0251] In one embodiment, the invention features a double stranded short interfering nucleic acid (siNA) molecule that comprises a first nucleotide sequence complementary to a target RNA sequence or a portion thereof (e.g., influenza or host RNA), and a second sequence having complementarity to said first sequence, wherein said second sequence comprises a terminal cap moiety at the 5′-end and 3′-end of said second sequence. In one embodiment, each terminal cap moiety individually comprises an inverted abasic, inverted deoxy abasic, inverted nucleotide moiety, a group shown in FIG. 10, an alkyl or cycloalkyl group, a heterocycle, or any other group that prevents RNAi activity in which the second sequence serves as a guide sequence or template for RNAi.

[0252] In one embodiment, the invention features a method for generating siNA molecules of the invention with improved specificity for down regulating or inhibiting the expression of a target nucleic acid (e.g., a DNA or RNA such as a gene or its corresponding RNA), comprising (a) introducing one or more chemical modifications into the structure of a siNA molecule, and (b) assaying the siNA molecule of step (a) under conditions suitable for isolating siNA molecules having improved specificity. In another embodiment, the chemical modification used to improve specificity comprises terminal cap modifications at the 5′-end, 3′-end, or both 5′ and 3′-ends of the siNA molecule. The terminal cap modifications can comprise, for example, structures shown in FIG. 10 (e.g. inverted deoxyabasic moieties) or any other chemical modification that renders a portion of the siNA molecule (e.g. the sense strand) incapable of mediating RNA interference against an off target nucleic acid sequence. In a non-limiting example, a siNA molecule is designed such that only the antisense sequence of the siNA molecule can serve as a guide sequence for RISC mediated degradation of a corresponding target RNA sequence. This can be accomplished by rendering the sense sequence of the siNA inactive by introducing chemical modifications to the sense strand that preclude recognition of the sense strand as a guide sequence by RNAi machinery. In one embodiment, such chemical modifications comprise any chemical group at the 5′-end of the sense strand of the siNA, or any other group that serves to render the sense strand inactive as a guide sequence for mediating RNA interference. These modifications, for example, can result in a molecule where the 5′-end of the sense strand no longer has a free 5′-hydroxyl (5′-OH) or a free 5′-phosphate group (e.g., phosphate, diphosphate, triphosphate, cyclic phosphate etc.). Non-limiting examples of such siNA constructs are described herein, such as “Stab 9/10”, “Stab 7/8”, “Stab 7/19”, “Stab 17/22”, “Stab 23/24”, “Stab 24/25”, and “Stab 24/26” (e.g., any siNA having Stab 7, 9, 17, 23, or 24 sense strands) chemistries and variants thereof (see Table IV) wherein the 5′-end and 3′-end of the sense strand of the siNA do not comprise a hydroxyl group or phosphate group. Herein, numeric Stab chemistries include both 2′-fluoro and 2′-OCF3 versions of the chemistries shown in Table IV. For example, “Stab 7/8” refers to both Stab 7/8 and Stab 7F/8F etc.

[0253] In one embodiment, the invention features a method for generating siNA molecules of the invention with improved specificity for down regulating or inhibiting the expression of a target nucleic acid (e.g., a DNA or RNA such as a gene or its corresponding RNA), comprising introducing one or more chemical modifications into the structure of a siNA molecule that prevent a strand or portion of the siNA molecule from acting as a template or guide sequence for RNAi activity. In one embodiment, the inactive strand or sense region of the siNA molecule is the sense strand or sense region of the siNA molecule, i.e. the strand or region of the siNA that does not have complementarity to the target nucleic acid sequence. In one embodiment, such chemical modifications comprise any chemical group at the 5′-end of the sense strand or region of the siNA that does not comprise a 5′-hydroxyl (5′-OH) or 5′-phosphate group, or any other group that serves to render the sense strand or sense region inactive as a guide sequence for mediating RNA interference. Non-limiting examples of such siNA constructs are described herein, such as “Stab 9/10”, “Stab 7/8”, “Stab 7/19”, “Stab 17/22”, “Stab 23/24”, “Stab 24/25”, and “Stab 24/26” (e.g., any siNA having Stab 7, 9, 17, 23, or 24 sense strands) chemistries and variants thereof (see Table I) wherein the 5′-end and 3′-end of the sense strand of the siNA do not comprise a hydroxyl group or phosphate group. Herein, numeric Stab chemistries include both 2′-fluoro and 2′-OCF3 versions of the chemistries shown in Table IV. For example, “Stab 7/8” refers to both Stab 7/8 and Stab 7F/8F etc.

[0254] In one embodiment, the invention features a method for screening siNA molecules that are active in mediating RNA interference against a target nucleic acid sequence comprising (a) generating a plurality of unmodified siNA molecules, (b) screening the siNA molecules of step (a) under conditions suitable for isolating siNA molecules that are active in mediating RNA interference against the target nucleic acid sequence, and (c) introducing chemical modifications (e.g. chemical modifications as described herein or as otherwise known in the art) into the active siNA molecules of (b). In one embodiment, the method further comprises re-screening the chemically modified siNA molecules of step (c) under conditions suitable for isolating chemically modified siNA molecules that are active in mediating RNA interference against the target nucleic acid sequence.

[0255] In one embodiment, the invention features a method for screening chemically modified siNA molecules that are active in mediating RNA interference against a target nucleic acid sequence comprising (a) generating a plurality of chemically modified siNA molecules (e.g. siNA molecules as described herein or as otherwise known in the art), and (b) screening the siNA molecules of step (a) under conditions suitable for isolating chemically modified siNA molecules that are active in mediating RNA interference against the target nucleic acid sequence.

[0256] The term “ligand” refers to any compound or molecule, such as a drug, peptide, hormone, or neurotransmitter, that is capable of interacting with another compound, such as a receptor, either directly or indirectly. The receptor that interacts with a ligand can be present on the surface of a cell or can alternately be an intercellular receptor. Interaction of the ligand with the receptor can result in a biochemical reaction, or can simply be a physical interaction or association.

[0257] In another embodiment, the invention features a method for generating siNA molecules of the invention with improved bioavailability comprising (a) introducing an excipient formulation to a siNA molecule, and (b) assaying the siNA molecule of step (a) under conditions suitable for isolating siNA molecules having improved bioavailability. Such excipients include polymers such as cyclodextrins, lipids, cationic lipids, polyamines, phospholipids, nanoparticles, receptors, ligands, and others.

[0258] In another embodiment, the invention features a method for generating siNA molecules of the invention with improved bioavailability comprising (a) introducing nucleotides having any of Formulae I-VII or any combination thereof into a siNA molecule, and (b) assaying the siNA molecule of step (a) under conditions suitable for isolating siNA molecules having improved bioavailability.

[0259] In another embodiment, polyethylene glycol (PEG) can be covalently attached to siNA compounds of the present invention. The attached PEG can be any molecular weight, preferably from about 100 to about 50,000 daltons (Da).

[0260] The present invention can be used alone or as a component of a kit having at least one of the reagents necessary to carry out the in vitro or in vivo introduction of RNA to test samples and/or subjects. For example, preferred components of the kit include a siNA molecule of the invention and a vehicle that promotes introduction of the siNA into cells of interest as described herein (e.g., using lipids and other methods of transfection known in the art, see for example Beigelman et al, U.S. Pat. No. 6,395,713). The kit can be used for target validation, such as in determining gene function and/or activity, or in drug optimization, and in drug discovery (see for example Usman et al., U.S. Ser. No. 60/402,996). Such a kit can also include instructions to allow a user of the kit to practice the invention.

[0261] The term “short interfering nucleic acid”, “siNA”, “short interfering RNA”, “siRNA”, “short interfering nucleic acid molecule”, “short interfering oligonucleotide molecule”, or “chemically-modified short interfering nucleic acid molecule” as used herein refers to any nucleic acid molecule capable of inhibiting or down regulating gene expression or viral replication by mediating RNA interference “RNAi” or gene silencing in a sequence-specific manner. For example the siNA can be a double-stranded nucleic acid molecule comprising self-complementary sense and antisense regions, wherein the antisense region comprises nucleotide sequence that is complementary to nucleotide sequence in a target nucleic acid molecule or a portion thereof and the sense region having nucleotide sequence corresponding to the target nucleic acid sequence or a portion thereof. The siNA can be assembled from two separate oligonucleotides, where one strand is the sense strand and the other is the antisense strand, wherein the antisense and sense strands are self-complementary (i.e., each strand comprises nucleotide sequence that is complementary to nucleotide sequence in the other strand; such as where the antisense strand and sense strand form a duplex or double stranded structure, for example wherein the double stranded region is about 15 to about 30, e.g., about 15, 16, 17, 18, 19, 20, 21, 22, 23, 24, 25, 26, 27, 28, 29 or 30 base pairs; the antisense strand comprises nucleotide sequence that is complementary to nucleotide sequence in a target nucleic acid molecule or a portion thereof and the sense strand comprises nucleotide sequence corresponding to the target nucleic acid sequence or a portion thereof (e.g., about 15 to about 25 or more nucleotides of the siNA molecule are complementary to the target nucleic acid or a portion thereof). Alternatively, the siNA is assembled from a single oligonucleotide, where the self-complementary sense and antisense regions of the siNA are linked by means of a nucleic acid based or non-nucleic acid-based linker(s). The siNA can be a polynucleotide with a duplex, asymmetric duplex, hairpin or asymmetric hairpin secondary structure, having self-complementary sense and antisense regions, wherein the antisense region comprises nucleotide sequence that is complementary to nucleotide sequence in a separate target nucleic acid molecule or a portion thereof and the sense region having nucleotide sequence corresponding to the target nucleic acid sequence or a portion thereof. The siNA can be a circular single-stranded polynucleotide having two or more loop structures and a stem comprising self-complementary sense and antisense regions, wherein the antisense region comprises nucleotide sequence that is complementary to nucleotide sequence in a target nucleic acid molecule or a portion thereof and the sense region having nucleotide sequence corresponding to the target nucleic acid sequence or a portion thereof, and wherein the circular polynucleotide can be processed either in vivo or in vitro to generate an active siNA molecule capable of mediating RNAi. The siNA can also comprise a single stranded polynucleotide having nucleotide sequence complementary to nucleotide sequence in a target nucleic acid molecule or a portion thereof (for example, where such siNA molecule does not require the presence within the siNA molecule of nucleotide sequence corresponding to the target nucleic acid sequence or a portion thereof), wherein the single stranded polynucleotide can further comprise a terminal phosphate group, such as a 5′-phosphate (see for example Martinez et al., 2002, Cell., 110, 563-574 and Schwarz et al., 2002, Molecular Cell, 10, 537-568), or 5′,3′-diphosphate. In certain embodiments, the siNA molecule of the invention comprises separate sense and antisense sequences or regions, wherein the sense and antisense regions are covalently linked by nucleotide or non-nucleotide linkers molecules as is known in the art, or are alternately non-covalently linked by ionic interactions, hydrogen bonding, van der waals interactions, hydrophobic interactions, and/or stacking interactions. In certain embodiments, the siNA molecules of the invention comprise nucleotide sequence that is complementary to nucleotide sequence of a target gene. In another embodiment, the siNA molecule of the invention interacts with nucleotide sequence of a target gene in a manner that causes inhibition of expression of the target gene. As used herein, siNA molecules need not be limited to those molecules containing only RNA, but further encompasses chemically-modified nucleotides and non-nucleotides. In certain embodiments, the short interfering nucleic acid molecules of the invention lack 2′-hydroxy (2′-OH) containing nucleotides. Applicant describes in certain embodiments short interfering nucleic acids that do not require the presence of nucleotides having a 2′-hydroxy group for mediating RNAi and as such, short interfering nucleic acid molecules of the invention optionally do not include any ribonucleotides (e.g., nucleotides having a 2′-OH group). Such siNA molecules that do not require the presence of ribonucleotides within the siNA molecule to support RNAi can however have an attached linker or linkers or other attached or associated groups, moieties, or chains containing one or more nucleotides with 2′-OH groups. Optionally, siNA molecules can comprise ribonucleotides at about 5, 10, 20, 30, 40, or 50% of the nucleotide positions. The modified short interfering nucleic acid molecules of the invention can also be referred to as short interfering modified oligonucleotides “siMON.” As used herein, the term siNA is meant to be equivalent to other terms used to describe nucleic acid molecules that are capable of mediating sequence specific RNAi, for example short interfering RNA (siRNA), double-stranded RNA (dsRNA), micro-RNA (miRNA), short hairpin RNA (shRNA), short interfering oligonucleotide, short interfering nucleic acid, short interfering modified oligonucleotide, chemically-modified siRNA, post-transcriptional gene silencing RNA (ptgsRNA), and others. Non limiting examples of siNA molecules of the invention are shown in FIGS. 4-6, and Table II herein. Such siNA molecules are distinct from other nucleic acid technologies known in the art that mediate inhibition of gene expression, such as ribozymes, antisense, triplex forming, aptamer, 2,5-A chimera, or decoy oligonucleotides.

[0262] By “RNA interference” or “RNAi” is meant a biological process of inhibiting or down regulating gene expression in a cell as is generally known in the art and which is mediated by short interfering nucleic acid molecules, see for example Zamore and Haley, 2005, Science, 309, 1519-1524; Vaughn and Martienssen, 2005, Science, 309, 1525-1526; Zamore et al., 2000, Cell, 101, 25-33; Bass, 2001, Nature, 411, 428-429; Elbashir et al., 2001, Nature, 411, 494-498; and Kreutzer et al., International PCT Publication No. WO 00/44895; Zernicka-Goetz et al., International PCT Publication No. WO 01/36646; Fire, International PCT Publication No. WO 99/32619; Plaetinck et aL, International PCT Publication No. WO 00/01846; Mello and Fire, International PCT Publication No. WO 01/29058; Deschamps-Depaillette, International PCT Publication No. WO 99/07409; and Li et al., International PCT Publication No. WO 00/44914; Allshire, 2002, Science, 297, 1818-1819; Volpe et al., 2002, Science, 297, 1833-1837; Jenuwein, 2002, Science, 297, 2215-2218; and Hall et aL, 2002, Science, 297, 2232-2237; Hutvagner and Zamore, 2002, Science, 297, 2056-60; McManus et al., 2002, RNA, 8, 842-850; Reinhart et al., 2002, Gene & Dev., 16, 1616-1626; and Reinhart & Bartel, 2002, Science, 297, 1831). In addition, as used herein, the term RNAi is meant to be equivalent to other terms used to describe sequence specific RNA interference, such as post transcriptional gene silencing, translational inhibition, transcriptional inhibition, or epigenetics. For example, siNA molecules of the invention can be used to epigenetically silence genes at both the post-transcriptional level or the pre-transcriptional level. In a non-limiting example, epigenetic modulation of gene expression by siNA molecules of the invention can result from siNA mediated modification of chromatin structure or methylation patterns to alter gene expression (see, for example, Verdel et al., 2004, Science, 303, 672-676; Pal-Bhadra et al., 2004, Science, 303, 669-672; Allshire, 2002, Science, 297, 1818-1819; Volpe et al., 2002, Science, 297, 1833-1837; Jenuwein, 2002, Science, 297, 2215-2218; and Hall et al., 2002, Science, 297, 2232-2237). In another non-limiting example, modulation of gene expression by siNA molecules of the invention can result from siNA mediated cleavage of RNA (either coding or non-coding RNA) via RISC, or alternately, translational inhibition as is known in the art. In another embodiment, modulation of gene expression by siNA molecules of the invention can result from transcriptional inhibition (see for example Janowski et al., 2005, Nature Chemical Biology, 1, 216-222).

[0263] In one embodiment, a siNA molecule of the invention is a duplex forming oligonucleotide “DFO”, (see for example FIGS. 14-15 and Vaish et al., U.S. Ser. No. 10/727,780 filed Dec. 3, 2003 and International PCT Application No. US04/16390, filed May 24, 2004).

[0264] In one embodiment, a siNA molecule of the invention is a multifunctional siNA, (see for example FIGS. 16-21 and Jadhav et al., U.S. Ser. No. 60/543,480 filed Feb. 10, 2004 and International PCT Application No. US04/16390, filed May 24, 2004). In one embodiment, the multifunctional siNA of the invention can comprise sequence targeting, for example, two or more regions of target RNA (see for example target sequences in Table II or III).

[0265] By “asymmetric hairpin” as used herein is meant a linear siNA molecule comprising an antisense region, a loop portion that can comprise nucleotides or non-nucleotides, and a sense region that comprises fewer nucleotides than the antisense region to the extent that the sense region has enough complementary nucleotides to base pair with the antisense region and form a duplex with loop. For example, an asymmetric hairpin siNA molecule of the invention can comprise an antisense region having length sufficient to mediate RNAi in a cell or in vitro system (e.g. about 15 to about 30, or about 15, 16, 17, 18, 19, 20, 21, 22, 23, 24, 25, 26, 27, 28, 29, or 30 nucleotides) and a loop region comprising about 4 to about 12 (e.g., about 4, 5, 6, 7, 8, 9, 10, 11, or 12) nucleotides, and a sense region having about 3 to about 25 (e.g., about 3, 4, 5, 6, 7, 8, 9, 10, 11, 12, 13, 14, 15, 16, 17, 18, 19, 20, 21, 22, 23, 24, or 25) nucleotides that are complementary to the antisense region. The asymmetric hairpin siNA molecule can also comprise a 5′-terminal phosphate group that can be chemically modified. The loop portion of the asymmetric hairpin siNA molecule can comprise nucleotides, non-nucleotides, linker molecules, or conjugate molecules as described herein.

[0266] By “asymmetric duplex” as used herein is meant a siNA molecule having two separate strands comprising a sense region and an antisense region, wherein the sense region comprises fewer nucleotides than the antisense region to the extent that the sense region has enough complementary nucleotides to base pair with the antisense region and form a duplex. For example, an asymmetric duplex siNA molecule of the invention can comprise an antisense region having length sufficient to mediate RNAi in a cell or in vitro system (e.g., about 15 to about 30, or about 15, 16, 17, 18, 19, 20, 21, 22, 23, 24, 25, 26, 27, 28, 29, or 30 nucleotides) and a sense region having about 3 to about 25 (e.g., about 3, 4, 5, 6, 7, 8, 9, 10, 11, 12, 13, 14, 15, 16, 17, 18, 19, 20, 21, 22, 23, 24, or 25) nucleotides that are complementary to the antisense region.

[0267] By “modulate” is meant that the expression of the gene, or level of a RNA molecule or equivalent RNA molecules encoding one or more proteins or protein subunits, or activity of one or more proteins or protein subunits is up regulated or down regulated, such that expression, level, or activity is greater than or less than that observed in the absence of the modulator. For example, the term “modulate” can mean “inhibit,” but the use of the word “modulate” is not limited to this definition.

[0268] By “inhibit”, “down-regulate”, or “reduce”, it is meant that the expression of the gene, or level of RNA molecules or equivalent RNA molecules encoding one or more proteins or protein subunits, or activity of one or more proteins or protein subunits, is reduced below that observed in the absence of the nucleic acid molecules (e.g., siNA) of the invention. In one embodiment, inhibition, down-regulation or reduction with an siNA molecule is below that level observed in the presence of an inactive or attenuated molecule. In another embodiment, inhibition, down-regulation, or reduction with siNA molecules is below that level observed in the presence of, for example, an siNA molecule with scrambled sequence or with mismatches. In another embodiment, inhibition, down-regulation, or reduction of gene expression with a nucleic acid molecule of the instant invention is greater in the presence of the nucleic acid molecule than in its absence. In one embodiment, inhibition, down regulation, or reduction of gene expression is associated with post transcriptional silencing, such as RNAi mediated cleavage of a target nucleic acid molecule (e.g. RNA) or inhibition of translation. In one embodiment, inhibition, down regulation, or reduction of gene expression is associated with pretranscriptional silencing, such as by alterations in DNA methylation patterns and DNA chromatin structure.

[0269] By “up-regulate”, or “promote”, it is meant that the expression of the gene, or level of RNA molecules or equivalent RNA molecules encoding one or more proteins or protein subunits, or activity of one or more proteins or protein subunits, is increased above that observed in the absence of the nucleic acid molecules (e.g., siNA) of the invention. In one embodiment, up-regulation or promotion of gene expression with an siNA molecule is above that level observed in the presence of an inactive or attenuated molecule. In another embodiment, up-regulation or promotion of gene expression with siNA molecules is above that level observed in the presence of, for example, an siNA molecule with scrambled sequence or with mismatches. In another embodiment, up-regulation or promotion of gene expression with a nucleic acid molecule of the instant invention is greater in the presence of the nucleic acid molecule than in its absence. In one embodiment, up-regulation or promotion of gene expression is associated with inhibition of RNA mediated gene silencing, such as RNAi mediated cleavage or silencing of a coding or non-coding RNA target that down regulates, inhibits, or silences the expression of the gene of interest to be up-regulated. The down regulation of gene expression can, for example, be induced by a coding RNA or its encoded protein, such as through negative feedback or antagonistic effects. The down regulation of gene expression can, for example, be induced by a non-coding RNA having regulatory control over a gene of interest, for example by silencing expression of the gene via translational inhibition, chromatin structure, methylation, RISC mediated RNA cleavage, or translational inhibition. As such, inhibition or down regulation of targets that down regulate, suppress, or silence a gene of interest can be used to up-regulate or promote expression of the gene of interest toward therapeutic use.

[0270] By “gene”, or “target gene” or “target DNA”, is meant a nucleic acid that encodes an RNA, for example, nucleic acid sequences including, but not limited to, structural genes encoding a polypeptide. A gene or target gene can also encode a functional RNA (FRNA) or non-coding RNA (ncRNA), such as small temporal RNA (stRNA), micro RNA (miRNA), small nuclear RNA (snRNA), short interfering RNA (siRNA), small nucleolar RNA (snRNA), ribosomal RNA (rRNA), transfer RNA (tRNA) and precursor RNAs thereof. Such non-coding RNAs can serve as target nucleic acid molecules for siNA mediated RNA interference in modulating the activity of fRNA or ncRNA involved in functional or regulatory cellular processes. Abberant fRNA or ncRNA activity leading to disease can therefore be modulated by siNA molecules of the invention. siNA molecules targeting fRNA and ncRNA can also be used to manipulate or alter the genotype or phenotype of a subject, organism or cell, by intervening in cellular processes such as genetic imprinting, transcription, translation, or nucleic acid processing (e.g., transamination, methylation etc.). The target gene can be a gene derived from a cell, an endogenous gene, a transgene, or exogenous genes such as genes of a pathogen, for example a virus, which is present in the cell after infection thereof. The cell containing the target gene can be derived from or contained in any organism, for example a plant, animal, protozoan, virus, bacterium, or fungus. Non-limiting examples of plants include monocots, dicots, or gymnosperms. Non-limiting examples of animals include vertebrates or invertebrates. Non-limiting examples of fungi include molds or yeasts. For a review, see for example Snyder and Gerstein, 2003, Science, 300, 258-260. In one embodiment, the target gene is a host gene or host DNA that is involved in the influenza virus life cycle or infection. In another embodiment, the target gene is an influenza virus RNA.

[0271] By “non-canonical base pair” is meant any non-Watson Crick base pair, such as mismatches and/or wobble base pairs, including flipped mismatches, single hydrogen bond mismatches, trans-type mismatches, triple base interactions, and quadruple base interactions. Non-limiting examples of such non-canonical base pairs include, but are not limited to, AC reverse Hoogsteen, AC wobble, AU reverse Hoogsteen, GU wobble, AA N7 amino, CC 2-carbonyl-amino(H1)-N3-amino(H2), GA sheared, UC 4-carbonyl-amino, UU imino-carbonyl, AC reverse wobble, AU Hoogsteen, AU reverse Watson Crick, CG reverse Watson Crick, GC N3-amino-amino N3, AA N1-amino symmetric, AA N7-amino symmetric, GA N7-N1 amino-carbonyl, GA+carbonyl-amino N7-N1, GG N1-carbonyl symmetric, GG N3-amino symmetric, CC carbonyl-amino symmetric, CC N3-amino symmetric, UU 2-carbonyl-imino symmetric, UU 4-carbonyl-imino symmetric, AA amino-N3, AA N1-amino, AC amino 2-carbonyl, AC N3-amino, AC N7-amino, AU amino-4-carbonyl, AU N1-imino, AU N3-imino, AU N7-imino, CC carbonyl-amino, GA amino-N1, GA amino-N7, GA carbonyl-amino, GA N3-amino, GC amino-N3, GC carbonyl-amino, GC N3-amino, GC N7-amino, GG amino-N7, GG carbonyl-imino, GG N7-amino, GU amino-2-carbonyl, GU carbonyl-imino, GU imino-2-carbonyl, GU N7-imino, psiU imino-2-carbonyl, UC 4-carbonyl-amino, UC imino-carbonyl, UU imino-4-carbonyl, AC C2-H—N3, GA carbonyl-C2-H, UU imino-4-carbonyl 2 carbonyl-C5-H, AC amino(A) N3(C)-carbonyl, GC imino amino-carbonyl, Gpsi imino-2-carbonyl amino-2-carbonyl, and GU imino amino-2-carbonyl base pairs.

[0272] By “influenza” as used herein is meant, any influenza virus or influenza virus protein, peptide, or polypeptide having influenza activity, such as encoded by Genbank Accession Nos. shown in Table I. The term influenza also refers to nucleic acid sequences encoding any influenza protein, peptide, or polypeptide having influenza activity. The term “influenza” is also meant to include other influenza encoding sequence, such as other influenza isoforms, mutant influenza genes, splice variants of influenza genes, and influenza gene polymorphisms. In one embodiment, the term influenza as used herein refers to cellular or host proteins or polynucleotides encoding such proteins or that are otherwise involved in influenza infection, life cycle, and/or replication. The term influenza is meant to include any strain or serotype of the influenza virus, including any combination of HA, e.g., H1, H2, H3, H4, H5, H6, H7, H8, H9, H10, H11, H12, H13, H14, H15, H16; and NA, e.g., N1, N2, N3, N4, N5, N6, N7, N8 or N9 genes. In one embodiment, influenza refers to H5N1 influenza (bird flu or pandemic influenza). In one embodiment, influenza refers to other strains or subtypes of the influenza virus, including but not limited to H1N1, H2N2, and H3N2.

[0273] By “target” as used herein is meant, any influenza protein, peptide, or polypeptide, such as encoded by Genbank Accession Nos. shown in Table I herein. The term “target” also refers to nucleic acid sequences or polynucleotide sequence encoding any protein, peptide, or polypeptide, such as proteins, peptides, or polypeptides involved in the influenza life cycle (e.g., influenza virus or host derived proteins). The target of interest can include target polynucleotide sequences, such as target DNA or target RNA. The term “target” is also meant to include other sequences, such as differing isoforms, mutant target genes, splice variants of target polynucleotides, target polymorphisms, and non-coding (e.g., ncRNA, miRNA, sRNA) or other regulatory polynucleotide sequences as described herein. Therefore, in various embodiments of the invention, a double stranded nucleic acid molecule of the invention (e.g., siNA) having complementarity to a target RNA can be used to inhibit or down regulate miRNA or other ncRNA activity. In one embodiment, inhibition of miRNA or ncRNA activity can be used to down regulate or inhibit gene expression (e.g., gene targets described herein or otherwise known in the art) or viral replication (e.g., viral targets described herein or otherwise known in the art) that is dependent on miRNA or ncRNA activity. In another embodiment, inhibition of miRNA or ncRNA activity by double stranded nucleic acid molecules of the invention (e.g. siNA) having complementarity to the miRNA or ncRNA can be used to up regulate or promote target gene expression (e.g., gene targets described herein or otherwise known in the art) where the expression of such genes is down regulated, suppressed, or silenced by the miRNA or ncRNA. In one embodiment, a target is a nucleotide sequence shown in Table II or III herein.

[0274] By “homologous sequence” is meant, a nucleotide sequence that is shared by one or more polynucleotide sequences, such as genes, gene transcripts and/or non-coding polynucleotides. For example, a homologous sequence can be a nucleotide sequence that is shared by two or more different strains or serotypes of influenza, two or more genes encoding related but different proteins, such as different members of a gene family, different genes of the same virus (e.g., influenza HA, NA, NP, M, NS, PA, PB1, or PB2 genes), different protein epitopes, different protein isoforms or completely divergent genes, such as a cytokine and its corresponding receptors. A homologous sequence can be a nucleotide sequence that is shared by two or more non-coding polynucleotides, such as noncoding DNA or RNA, regulatory sequences, introns, and sites of transcriptional control or regulation. Homologous sequences can also include conserved sequence regions shared by more than one polynucleotide sequence. Homology does not need to be perfect homology (e.g., 100%), as partially homologous sequences are also contemplated by the instant invention (e.g., 99%, 98%, 97%, 96%, 95%, 94%, 93%, 92%, 91%, 90%, 89%, 88%, 87%, 86%, 85%, 84%, 83%, 82%, 81%, 80% etc.).

[0275] By “conserved sequence region” is meant, a nucleotide sequence of one or more regions in a polynucleotide does not vary significantly between generations or from one biological system, subject, or organism to another biological system, subject, or organism. The polynucleotide can include both coding and non-coding DNA and RNA.

[0276] By “sense region” is meant a nucleotide sequence of a siNA molecule having complementarity to an antisense region of the siNA molecule. In addition, the sense region of a siNA molecule can comprise a nucleic acid sequence having homology with a target nucleic acid sequence. In one embodiment, the sense region of the siNA molecule is referred to as the sense strand or passenger strand.

[0277] By “antisense region” is meant a nucleotide sequence of a siNA molecule having complementarity to a target nucleic acid sequence. In addition, the antisense region of a siNA molecule can optionally comprise a nucleic acid sequence having complementarity to a sense region of the siNA molecule. In one embodiment, the antisense region of the siNA molecule is referred to as the antisense strand or guide strand.

[0278] By “target nucleic acid” or “target polynucleotide” is meant any nucleic acid sequence whose expression or activity is to be modulated (e.g., influenza or host nucleic acids). The target nucleic acid can be DNA or RNA. In one embodiment, a target nucleic acid of the invention is target RNA or DNA. In one embodiment, a target polynucleotide is a sequence shown in Table H or HI herein.

[0279] By “complementarity” is meant that a nucleic acid can form hydrogen bond(s) with another nucleic acid sequence by either traditional Watson-Crick or other non-traditional types as described herein. In one embodiment, a double stranded nucleic acid molecule of the invention, such as an siNA molecule, wherein each strand is between 15 and 30 nucleotides in length, comprises between about 10% and about 100% (e.g., about 10%, 20%, 30%, 40%, 50%, 60%, 70%, 80%, 90%, or 100%) complementarity between the two strands of the double stranded nucleic acid molecule. In another embodiment, a double stranded nucleic acid molecule of the invention, such as an siNA molecule, where one strand is the sense strand and the other stand is the antisense strand, wherein each strand is between 15 and 30 nucleotides in length, comprises between at least about 10% and about 100% (e.g., at least about 10%, 20%, 30%, 40%, 50%, 60%, 70%, 80%, 90%, or 100%) complementarity between the nucleotide sequence in the antisense strand of the double stranded nucleic acid molecule and the nucleotide sequence of its corresponding target nucleic acid molecule, such as a target RNA or target mRNA or viral RNA. In one embodiment, a double stranded nucleic acid molecule of the invention, such as an siNA molecule, where one strand comprises nucleotide sequence that is referred to as the sense region and the other strand comprises a nucleotide sequence that is referred to as the antisense region, wherein each strand is between 15 and 30 nucleotides in length, comprises between about 10% and about 100% (e.g., about 10%, 20%, 30%, 40%, 50%, 60%, 70%, 80%, 90%, or 100%) complementarity between the sense region and the antisense region of the double stranded nucleic acid molecule. In reference to the nucleic molecules of the present invention, the binding free energy for a nucleic acid molecule with its complementary sequence is sufficient to allow the relevant function of the nucleic acid to proceed, e.g., RNAi activity. Determination of binding free energies for nucleic acid molecules is well known in the art (see, e.g., Turner et al., 1987, CSH Symp. Quant. Biol. LII pp.123-133; Frier et al., 1986, Proc. Nat. Acad. Sci. USA 83:9373-9377; Turner et al., 1987, J Am. Chem. Soc. 109:3783-3785). A percent complementarity indicates the percentage of contiguous residues in a nucleic acid molecule that can form hydrogen bonds (e.g., Watson-Crick base pairing) with a second nucleic acid sequence (e.g., 5, 6, 7, 8, 9, or 10 nucleotides out of a total of 10 nucleotides in the first oligonucleotide being based paired to a second nucleic acid sequence having 10 nucleotides represents 50%, 60%, 70%, 80%, 90%, and 100% complementary respectively). In one embodiment, a siNA molecule of the invention has perfect complementarity between the sense strand or sense region and the antisense strand or antisense region of the siNA molecule. In one embodiment, a siNA molecule of the invention is perfectly complementary to a corresponding target nucleic acid molecule. “Perfectly complementary” means that all the contiguous residues of a nucleic acid sequence will hydrogen bond with the same number of contiguous residues in a second nucleic acid sequence. In one embodiment, a siNA molecule of the invention comprises about 15 to about 30 or more (e.g., about 15, 16, 17, 18, 19, 20, 21, 22, 23, 24, 25, 26, 27, 28, 29, or 30 or more) nucleotides that are complementary to one or more target nucleic acid molecules or a portion thereof. In one embodiment, a siNA molecule of the invention has partial complementarity (i.e., less than 100% complementarity) between the sense strand or sense region and the antisense strand or antisense region of the siNA molecule or between the antisense strand or antisense region of the siNA molecule and a corresponding target nucleic acid molecule. For example, partial complementarity can include various mismatches or non-based paired nucleotides (e.g., 1, 2, 3, 4, 5 or more mismatches or non-based paired nucleotides) within the siNA structure which can result in bulges, loops, or overhangs that result between the between the sense strand or sense region and the antisense strand or antisense region of the siNA molecule or between the antisense strand or antisense region of the siNA molecule and a corresponding target nucleic acid molecule.

[0280] In one embodiment, a double stranded nucleic acid molecule of the invention, such as siNA molecule, has perfect complementarity between the sense strand or sense region and the antisense strand or antisense region of the nucleic acid molecule. In one embodiment, double stranded nucleic acid molecule of the invention, such as siNA molecule, is perfectly complementary to a corresponding target nucleic acid molecule.

[0281] In one embodiment, double stranded nucleic acid molecule of the invention, such as siNA molecule, has partial complementarity (i.e., less than 100% complementarity) between the sense strand or sense region and the antisense strand or antisense region of the double stranded nucleic acid molecule or between the antisense strand or antisense region of the nucleic acid molecule and a corresponding target nucleic acid molecule. For example, partial complementarity can include various mismatches or non-base paired nucleotides (e.g., 1, 2, 3, 4, 5 or more mismatches or non-based paired nucleotides, such as nucleotide bulges) within the double stranded nucleic acid molecule, structure which can result in bulges, loops, or overhangs that result between the sense strand or sense region and the antisense strand or antisense region of the double stranded nucleic acid molecule or between the antisense strand or antisense region of the double stranded nucleic acid molecule and a corresponding target nucleic acid molecule.

[0282] In one embodiment, double stranded nucleic acid molecule of the invention is a microRNA (miRNA). By “microRNA” or “miRNA” is meant, a small double stranded RNA that regulates the expression of target messenger RNAs either by mRNA cleavage, translational repression/inhibition or heterochromatic silencing (see for example Ambros, 2004, Nature, 431, 350-355; Bartel, 2004, Cell, 116, 281-297; Cullen, 2004, Virus Research., 102, 3-9; He et al., 2004, Nat. Rev. Genet., 5, 522-531; and Ying et al., 2004, Gene, 342, 25-28). In one embodiment, the microRNA of the invention, has partial complementarity (i.e., less than 100% complementarity) between the sense strand or sense region and the antisense strand or antisense region of the miRNA molecule or between the antisense strand or antisense region of the miRNA and a corresponding target nucleic acid molecule. For example, partial complementarity can include various mismatches or non-base paired nucleotides (e.g., 1, 2, 3, 4, 5 or more mismatches or non-based paired nucleotides, such as nucleotide bulges) within the double stranded nucleic acid molecule, structure which can result in bulges, loops, or overhangs that result between the sense strand or sense region and the antisense strand or antisense region of the miRNA or between the antisense strand or antisense region of the miRNA and a corresponding target nucleic acid molecule.

[0283] In one embodiment, siNA molecules of the invention that down regulate or reduce target gene expression are used for preventing or treating influenza virus infection and any related diseases, disorders, conditions, or traits in a subject or organism as described herein or otherwise known in the art.

[0284] In one embodiment of the present invention, each sequence of a siNA molecule of the invention is independently about 15 to about 30 nucleotides in length, in specific embodiments about 15, 16, 17, 18, 19, 20, 21, 22, 23, 24, 25, 26, 27, 28, 29, or 30 nucleotides in length. In another embodiment, the siNA duplexes of the invention independently comprise about 15 to about 30 base pairs (e.g., about 15, 16, 17, 18, 19, 20, 21, 22, 23, 24, 25, 26, 27, 28, 29, or 30). In another embodiment, one or more strands of the siNA molecule of the invention independently comprises about 15 to about 30 nucleotides (e.g., about 15, 16, 17, 18, 19, 20, 21, 22, 23, 24, 25, 26, 27, 28, 29, or 30) that are complementary to a target nucleic acid molecule. In yet another embodiment, siNA molecules of the invention comprising hairpin or circular structures are about 35 to about 55 (e.g., about 35, 40, 45, 50 or 55) nucleotides in length, or about 38 to about 44 (e.g., about 38, 39, 40, 41, 42, 43, or 44) nucleotides in length and comprising about 15 to about 25 (e.g., about 15, 16, 17, 18, 19, 20, 21, 22, 23, 24, or 25) base pairs. Exemplary siNA molecules of the invention are shown in Table II, Table III and/or FIGS. 4-5.

[0285] As used herein “cell” is used in its usual biological sense, and does not refer to an entire multicellular organism, e.g., specifically does not refer to a human. The cell can be present in an organism, e.g., birds, plants and mammals such as humans, cows, sheep, apes, monkeys, swine, dogs, and cats. The cell can be prokaryotic (e.g., bacterial cell) or eukaryotic (e.g., mammalian or plant cell). The cell can be of somatic or germ line origin, totipotent or pluripotent, dividing or non-dividing. The cell can also be derived from or can comprise a gamete or embryo, a stem cell, or a fully differentiated cell.

[0286] The siNA molecules of the invention are added directly, or can be complexed with cationic lipids, packaged within liposomes, or otherwise delivered to target cells or tissues. The nucleic acid or nucleic acid complexes can be locally administered to relevant tissues ex vivo, or in vivo through local delivery to the lung, with or without their incorporation in biopolymers. In particular embodiments, the nucleic acid molecules of the invention comprise sequences shown in Tables II-III and/or FIGS. 4-5. Examples of such nucleic acid molecules consist essentially of sequences defined in these tables and figures. Furthermore, the chemically modified constructs described in Table IV can be applied to any siNA sequence of the invention.

[0287] In another aspect, the invention provides mammalian cells containing one or more siNA molecules of this invention. The one or more siNA molecules can independently be targeted to the same or different sites.

[0288] By “RNA” is meant a molecule comprising at least one ribonucleotide residue. By “ribonucleotide” is meant a nucleotide with a hydroxyl group at the 2′ position of a β-D-ribofuranose moiety. The terms include double-stranded RNA, single-stranded RNA, isolated RNA such as partially purified RNA, essentially pure RNA, synthetic RNA, recombinantly produced RNA, as well as altered RNA that differs from naturally occurring RNA by the addition, deletion, substitution and/or alteration of one or more nucleotides. Such alterations can include addition of non-nucleotide material, such as to the end(s) of the siNA or internally, for example at one or more nucleotides of the RNA. Nucleotides in the RNA molecules of the instant invention can also comprise non-standard nucleotides, such as non-naturally occurring nucleotides or chemically synthesized nucleotides or deoxynucleotides. These altered RNAs can be referred to as analogs or analogs of naturally-occurring RNA.

[0289] By “subject” is meant an organism, which is a donor or recipient of explanted cells or the cells themselves. “Subject” also refers to an organism to which the nucleic acid molecules of the invention can be administered. A subject can be a mammal or mammalian cells, including a human or human cells.

[0290] By “chemical modification” as used herein is meant any modification of chemical structure of the nucleotides that differs from nucleotides of native siRNA or RNA. The term “chemical modification” encompasses the addition, substitution, or modification of native siRNA or RNA nucleosides and nucleotides with modified nucleosides and modified nucleotides as described herein or as is otherwise known in the art. Non-limiting examples of such chemical modifications include without limitation phosphorothioate internucleotide linkages, 2′-deoxyribonucleotides, 2′-O-methyl ribonucleotides, 2′-deoxy-2′-fluoro ribonucleotides, 4′-thio ribonucleotides, 2′-O-trifluoromethyl nucleotides, 2′-O-ethyl-trifluoromethoxy nucleotides, 2′-O-difluoromethoxy-ethoxy nucleotides (see for example U.S. Ser. No. 10/981,966 filed Nov. 5, 2004, incorporated by reference herein), “universal base” nucleotides, “acyclic” nucleotides, 5-C-methyl nucleotides, terminal glyceryl and/or inverted deoxy abasic residue incorporation, or a modification having any of Formulae I-VII herein.

[0291] The term “phosphorothioate” as used herein refers to an intemucleotide linkage having Formula I, wherein Z and/or W comprise a sulfur atom. Hence, the term phosphorothioate refers to both phosphorothioate and phosphorodithioate intemucleotide linkages.

[0292] The term “phosphonoacetate” as used herein refers to an intemucleotide linkage having Formula I, wherein Z and/or W comprise an acetyl or protected acetyl group.

[0293] The term “thiophosphonoacetate” as used herein refers to an intemucleotide linkage having Formula I, wherein Z comprises an acetyl or protected acetyl group and W comprises a sulfur atom or alternately W comprises an acetyl or protected acetyl group and Z comprises a sulfur atom.

[0294] The term “universal base” as used herein refers to nucleotide base analogs that form base pairs with each of the natural DNA/RNA bases with little discrimination between them. Non-limiting examples of universal bases include C-phenyl, C-naphthyl and other aromatic derivatives, inosine, azole carboxamides, and nitroazole derivatives such as 3-nitropyrrole, 4-nitroindole, 5-nitroindole, and 6-nitroindole as known in the art (see for example Loakes, 2001, Nucleic Acids Research, 29, 2437-2447).

[0295] The term “acyclic nucleotide” as used herein refers to any nucleotide having an acyclic ribose sugar, for example where any of the ribose carbons (C1, C2, C3, C4, or C5), are independently or in combination absent from the nucleotide.

[0296] The nucleic acid molecules of the instant invention, individually, or in combination or in conjunction with other drugs, can be used to for preventing or treating diseases, disorders, conditions, and traits described herein or otherwise known in the art, in a subject or organism.

[0297] In one embodiment, the siNA molecules of the invention can be administered to a subject or can be administered to other appropriate cells evident to those skilled in the art, individually or in combination with one or more drugs under conditions suitable for the treatment.

[0298] In a further embodiment, the siNA molecules can be used in combination with other known treatments to prevent or treat in a subject or organism. For example, the described molecules could be used in combination with one or more known compounds, treatments, or procedures to prevent or treat diseases, disorders, conditions, and traits described herein in a subject or organism as are known in the art.

[0299] In one embodiment, the invention features an expression vector comprising a nucleic acid sequence encoding at least one siNA molecule of the invention, in a manner which allows expression of the siNA molecule. For example, the vector can contain sequence(s) encoding both strands of a siNA molecule comprising a duplex. The vector can also contain sequence(s) encoding a single nucleic acid molecule that is self-complementary and thus forms a siNA molecule. Non-limiting examples of such expression vectors are described in Paul et al., 2002, Nature Biotechnology, 19, 505; Miyagishi and Taira, 2002, Nature Biotechnology, 19, 497; Lee et al., 2002, Nature Biotechnology, 19, 500; and Novina et al., 2002, Nature Medicine, advance online publication doi: 10.1038/nm725.

[0300] In another embodiment, the invention features a mammalian cell, for example, a human cell, including an expression vector of the invention.

[0301] In yet another embodiment, the expression vector of the invention comprises a sequence for a siNA molecule having complementarity to a RNA molecule referred to by a Genbank Accession numbers, for example Genbank Accession Nos. shown in U.S. Ser. No. 10/923,536 and U.S. Ser. No. 10/923536, both incorporated by reference herein.

[0302] In one embodiment, an expression vector of the invention comprises a nucleic acid sequence encoding two or more siNA molecules, which can be the same or different.

[0303] In another aspect of the invention, siNA molecules that interact with target RNA molecules and down-regulate gene encoding target RNA molecules (for example target RNA molecules referred to by Genbank Accession numbers herein) are expressed from transcription units inserted into DNA or RNA vectors. The recombinant vectors can be DNA plasmids or viral vectors. siNA expressing viral vectors can be constructed based on, but not limited to, adeno-associated virus, retrovirus, adenovirus, or alphavirus. The recombinant vectors capable of expressing the siNA molecules can be delivered as described herein, and persist in target cells. Alternatively, viral vectors can be used that provide for transient expression of siNA molecules. Such vectors can be repeatedly administered as necessary. Once expressed, the siNA molecules bind and down-regulate gene function or expression via RNA interference (RNAi). Delivery of siNA expressing vectors can be systemic, such as by intravenous or intramuscular administration, by administration to target cells ex-planted from a subject followed by reintroduction into the subject, or by any other means that would allow for introduction into the desired target cell.

[0304] By “vectors” is meant any nucleic acid- and/or viral-based technique used to deliver a desired nucleic acid.

[0305] Other features and advantages of the invention will be apparent from the following description of the preferred embodiments thereof, and from the claims.

### BRIEF DESCRIPTION OF THE DRAWINGS

[0306] FIG. 1 shows a non-limiting example of a scheme for the synthesis of siNA molecules. The complementary siNA sequence strands, strand 1 and strand 2, are synthesized in tandem and are connected by a cleavable linkage, such as a nucleotide succinate or abasic succinate, which can be the same or different from the cleavable linker used for solid phase synthesis on a solid support. The synthesis can be either solid phase or solution phase, in the example shown, the synthesis is a solid phase synthesis. The synthesis is performed such that a protecting group, such as a dimethoxytrityl group, remains intact on the terminal nucleotide of the tandem oligonucleotide. Upon cleavage and deprotection of the oligonucleotide, the two siNA strands spontaneously hybridize to form a siNA duplex, which allows the purification of the duplex by utilizing the properties of the terminal protecting group, for example by applying a trityl on purification method wherein only duplexes/oligonucleotides with the terminal protecting group are isolated.

[0307] FIG. 2 shows a MALDI-TOF mass spectrum of a purified siNA duplex synthesized by a method of the invention. The two peaks shown correspond to the predicted mass of the separate siNA sequence strands. This result demonstrates that the siNA duplex generated from tandem synthesis can be purified as a single entity using a simple trityl-on purification methodology.

[0308] FIG. 3 shows a non-limiting proposed mechanistic representation of target RNA degradation involved in RNAi. Double-stranded RNA (dsRNA), which is generated by RNA-dependent RNA polymerase (RdRP) from foreign single-stranded RNA, for example viral, transposon, or other exogenous RNA, activates the DICER enzyme that in turn generates siNA duplexes. Alternately, synthetic or expressed siNA can be introduced directly into a cell by appropriate means. An active siNA complex forms which recognizes a target RNA, resulting in degradation of the target RNA by the RISC endonuclease complex or in the synthesis of additional RNA by RNA-dependent RNA polymerase (RdRP), which can activate DICER and result in additional siNA molecules, thereby amplifying the RNAi response.

[0309] FIG. 4A-F shows non-limiting examples of chemically-modified siNA constructs of the present invention. In the figure, N stands for any nucleotide (adenosine, guanosine, cytosine, uridine, or optionally thymidine, for example thymidine can be substituted in the overhanging regions designated by parenthesis (N N). Various modifications are shown for the sense and antisense strands of the siNA constructs.

[0310] FIG. 4A: The sense strand comprises 21 nucleotides wherein the two terminal 3′-nucleotides are optionally base paired and wherein all nucleotides present are ribonucleotides except for (N N) nucleotides, which can comprise ribonucleotides, deoxynucleotides, universal bases, or other chemical modifications described herein. The antisense strand comprises 21 nucleotides, optionally having a 3′-terminal glyceryl moiety wherein the two terminal 3′-nucleotides are optionally complementary to the target RNA sequence, and wherein all nucleotides present are ribonucleotides except for (N N) nucleotides, which can comprise ribonucleotides, deoxynucleotides, universal bases, or other chemical modifications described herein. A modified internucleotide linkage, such as a phosphorothioate, phosphorodithioate or other modified internucleotide linkage as described herein, shown as “s”, optionally connects the (N N) nucleotides in the antisense strand.

[0311] FIG. 4B: The sense strand comprises 21 nucleotides wherein the two terminal 3′-nucleotides are optionally base paired and wherein all pyrimidine nucleotides that may be present are 2′ deoxy-2′-fluoro modified nucleotides and all purine nucleotides that may be present are 2′-O-methyl modified nucleotides except for (N N) nucleotides, which can comprise ribonucleotides, deoxynucleotides, universal bases, or other chemical modifications described herein. The antisense strand comprises 21 nucleotides, optionally having a 3′-terminal glyceryl moiety and wherein the two terminal 3′-nucleotides are optionally complementary to the target RNA sequence, and wherein all pyrimidine nucleotides that may be present are 2′-deoxy-2′-fluoro modified nucleotides and all purine nucleotides that may be present are 2′-O-methyl modified nucleotides except for (N N) nucleotides, which can comprise ribonucleotides, deoxynucleotides, universal bases, or other chemical modifications described herein. A modified internucleotide linkage, such as a phosphorothioate, phosphorodithioate or other modified intemucleotide linkage as described herein, shown as “s”, optionally connects the (N N) nucleotides in the sense and antisense strand.

[0312] FIG. 4C: The sense strand comprises 21 nucleotides having 5′- and 3′-terminal cap moieties wherein the two terminal 3′-nucleotides are optionally base paired and wherein all pyrimidine nucleotides that may be present are 2′-O-methyl or 2′-deoxy-2′-fluoro modified nucleotides except for (N N) nucleotides, which can comprise ribonucleotides, deoxynucleotides, universal bases, or other chemical modifications described herein. The antisense strand comprises 21 nucleotides, optionally having a 3′-terminal glyceryl moiety and wherein the two terminal 3′-nucleotides are optionally complementary to the target RNA sequence, and wherein all pyrimidine nucleotides that may be present are 2′-deoxy-2′-fluoro modified nucleotides except for (N N) nucleotides, which can comprise ribonucleotides, deoxynucleotides, universal bases, or other chemical modifications described herein. A modified internucleotide linkage, such as a phosphorothioate, phosphorodithioate or other modified internucleotide linkage as described herein, shown as “s”, optionally connects the (N N) nucleotides in the antisense strand.

[0313] FIG. 4D: The sense strand comprises 21 nucleotides having 5′- and 3′-terminal cap moieties wherein the two terminal 3′-nucleotides are optionally base paired and wherein all pyrimidine nucleotides that may be present are 2′-deoxy-2′-fluoro modified nucleotides except for (N N) nucleotides, which can comprise ribonucleotides, deoxynucleotides, universal bases, or other chemical modifications described herein and wherein and all purine nucleotides that may be present are 2′-deoxy nucleotides. The antisense strand comprises 21 nucleotides, optionally having a 3′-terminal glyceryl moiety and wherein the two terminal 3′-nucleotides are optionally complementary to the target RNA sequence, wherein all pyrimidine nucleotides that may be present are 2′-deoxy-2′-fluoro modified nucleotides and all purine nucleotides that may be present are 2′-O-methyl modified nucleotides except for (N N) nucleotides, which can comprise ribonucleotides, deoxynucleotides, universal bases, or other chemical modifications described herein. A modified internucleotide linkage, such as a phosphorothioate, phosphorodithioate or other modified internucleotide linkage as described herein, shown as “s”, optionally connects the (N N) nucleotides in the antisense strand.

[0314] FIG. 4E: The sense strand comprises 21 nucleotides having 5′- and 3′-terminal cap moieties wherein the two terminal 3′-nucleotides are optionally base paired and wherein all pyrimidine nucleotides that may be present are 2′-deoxy-2′-fluoro modified nucleotides except for (N N) nucleotides, which can comprise ribonucleotides, deoxynucleotides, universal bases, or other chemical modifications described herein. The antisense strand comprises 21 nucleotides, optionally having a 3′-terminal glyceryl moiety and wherein the two terminal 3′-nucleotides are optionally complementary to the target RNA sequence, and wherein all pyrimidine nucleotides that may be present are 2′-deoxy-2′-fluoro modified nucleotides and all purine nucleotides that may be present are 2′-O-methyl modified nucleotides except for (N N) nucleotides, which can comprise ribonucleotides, deoxynucleotides, universal bases, or other chemical modifications described herein. A modified intemucleotide linkage, such as a phosphorothioate, phosphorodithioate or other modified intemucleotide linkage as described herein, shown as “s”, optionally connects the (N N) nucleotides in the antisense strand.

[0315] FIG. 4F: The sense strand comprises 21 nucleotides having 5′- and 3′-terminal cap moieties wherein the two terminal 3′-nucleotides are optionally base paired and wherein all pyrimidine nucleotides that may be present are 2′-deoxy-2′-fluoro modified nucleotides except for (N N) nucleotides, which can comprise ribonucleotides, deoxynucleotides, universal bases, or other chemical modifications described herein and wherein and all purine nucleotides that may be present are 2′-deoxy nucleotides. The antisense strand comprises 21 nucleotides, optionally having a 3′-terminal glyceryl moiety and wherein the two terminal 3′-nucleotides are optionally complementary to the target RNA sequence, and having one 3′-terminal phosphorothioate intemucleotide linkage and wherein all pyrimidine nucleotides that may be present are 2′-deoxy-2′-fluoro modified nucleotides and all purine nucleotides that may be present are 2′-deoxy nucleotides except for (N N) nucleotides, which can comprise ribonucleotides, deoxynucleotides, universal bases, or other chemical modifications described herein. A modified intemucleotide linkage, such as a phosphorothioate, phosphorodithioate or other modified intemucleotide linkage as described herein, shown as “s”, optionally connects the (N N) nucleotides in the antisense strand. The antisense strand of constructs A-F comprise sequence complementary to any target nucleic acid sequence of the invention. Furthermore, when a glyceryl moiety (L) is present at the 3′-end of the antisense strand for any construct shown in FIG. 4 A-F, the modified intemucleotide linkage is optional.

[0316] FIG. 5A-F shows non-limiting examples of specific chemically-modified siNA sequences of the invention. A-F applies the chemical modifications described in FIG. 4A-F to an exemplary influenza siNA sequence. Such chemical modifications can be applied to any target polynucleotide sequence.

[0317] FIG. 6A-B shows non-limiting examples of different siNA constructs of the invention.

[0318] The examples shown in FIG. 6A (constructs 1, 2, and 3) have 19 representative base pairs; however, different embodiments of the invention include any number of base pairs described herein. Bracketed regions represent nucleotide overhangs, for example, comprising about 1, 2, 3, or 4 nucleotides in length, preferably about 2 nucleotides. Constructs 1 and 2 can be used independently for RNAi activity. Construct 2 can comprise a polynucleotide or non-nucleotide linker, which can optionally be designed as a biodegradable linker. In one embodiment, the loop structure shown in construct 2 can comprise a biodegradable linker that results in the formation of construct 1 in vivo and/or in vitro. In another example, construct 3 can be used to generate construct 2 under the same principle wherein a linker is used to generate the active siNA construct 2 in vivo and/or in vitro, which can optionally utilize another biodegradable linker to generate the active siNA construct 1 in vivo and/or in vitro. As such, the stability and/or activity of the siNA constructs can be modulated based on the design of the siNA construct for use in vivo or in vitro and/or in vitro.

[0319] The examples shown in FIG. 6B represent different variations of double stranded nucleic acid molecule of the invention, such as microRNA, that can include overhangs, bulges, loops, and stem-loops resulting from partial complementarity. Such motifs having bulges, loops, and stem-loops are generally characteristics of miRNA. The bulges, loops, and stem-loops can result from any degree of partial complementarity, such as mismatches or bulges of about 1, 2, 3, 4, 5, 6, 7, 8, 9, 10 or more nucleotides in one or both strands of the double stranded nucleic acid molecule of the invention.

[0320] FIG. 7A-C is a diagrammatic representation of a scheme utilized in generating an expression cassette to generate siNA hairpin constructs.

[0321] FIG. 7A: A DNA oligomer is synthesized with a 5′-restriction site (R1) sequence followed by a region having sequence identical (sense region of. siNA) to a predetermined target sequence, wherein the sense region comprises, for example, about 19, 20, 21, or 22 nucleotides (N) in length, which is followed by a loop sequence of defined sequence (X), comprising, for example, about 3 to about 10 nucleotides.

[0322] FIG. 7B: The synthetic construct is then extended by DNA polymerase to generate a hairpin structure having self-complementary sequence that will result in a siNA transcript having specificity for a target sequence and having self-complementary sense and antisense regions.

[0323] FIG. 7C: The construct is heated (for example to about 95° C.) to linearize the sequence, thus allowing extension of a complementary second DNA strand using a primer to the 3′-restriction sequence of the first strand. The double-stranded DNA is then inserted into an appropriate vector for expression in cells. The construct can be designed such that a 3′-terminal nucleotide overhang results from the transcription, for example, by engineering restriction sites and/or utilizing a poly-U termination region as described in Paul et aL, 2002, Nature Biotechnology, 29, 505-508.

[0324] FIG. 8A-C is a diagrammatic representation of a scheme utilized in generating an expression cassette to generate double-stranded siNA constructs.

[0325] FIG. 8A: A DNA oligomer is synthesized with a 5′-restriction (R1) site sequence followed by a region having sequence identical (sense region of siNA) to a predetermined target sequence, wherein the sense region comprises, for example, about 19, 20, 21, or 22 nucleotides (N) in length, and which is followed by a 3′-restriction site (R2) which is adjacent to a loop sequence of defined sequence (X).

[0326] FIG. 8B: The synthetic construct is then extended by DNA polymerase to generate a hairpin structure having self-complementary sequence.

[0327] FIG. 8C: The construct is processed by restriction enzymes specific to R1 and R2 to generate a double-stranded DNA which is then inserted into an appropriate vector for expression in cells. The transcription cassette is designed such that a U6 promoter region flanks each side of the dsDNA which generates the separate sense and antisense strands of the siNA. Poly T termination sequences can be added to the constructs to generate U overhangs in the resulting transcript.

[0328] FIG. 9A-E is a diagrammatic representation of a method used to determine target sites for siNA mediated RNAi within a particular target nucleic acid sequence, such as messenger RNA.

[0329] FIG. 9A: A pool of siNA oligonucleotides are synthesized wherein the antisense region of the siNA constructs has complementarity to target sites across the target nucleic acid sequence, and wherein the sense region comprises sequence complementary to the antisense region of the siNA.

[0330] FIG. 9B&C: (FIG. 9B) The sequences are pooled and are inserted into vectors such that (FIG. 9C) transfection of a vector into cells results in the expression of the siNA.

[0331] FIG. 9D: Cells are sorted based on phenotypic change that is associated with modulation of the target nucleic acid sequence.

[0332] FIG. 9E: The siNA is isolated from the sorted cells and is sequenced to identify efficacious target sites within the target nucleic acid sequence.

[0333] FIG. 10 shows non-limiting examples of different stabilization chemistries (1-10) that can be used, for example, to stabilize the 3′-end of siNA sequences of the invention, including (1) [3-3′]-inverted deoxyribose; (2) deoxyribonucleotide; (3) [5′-3′]-3′-deoxyribonucleotide; (4) [5′-3′]-ribonucleotide; (5) [5′-3′]-3′-O-methyl ribonucleotide; (6) 3′-glyceryl; (7) [3′-5′]-3′-deoxyribonucleotide; (8) [3′-3′]-deoxyribonucleotide; (9) [5′-2′]-deoxyribonucleotide; and (10) [5-3′]-dideoxyribonucleotide. In addition to modified and unmodified backbone chemistries indicated in the figure, these chemistries can be combined with different backbone modifications as described herein, for example, backbone modifications having Formula I. In addition, the 2′-deoxy nucleotide shown 5′ to the terminal modifications shown can be another modified or unmodified nucleotide or non-nucleotide described herein, for example modifications having any of Formulae I-VII or any combination thereof.

[0334] FIG. 11 shows a non-limiting example of a strategy used to identify chemically modified siNA constructs of the invention that are nuclease resistance while preserving the ability to mediate RNAi activity. Chemical modifications are introduced into the siNA construct based on educated design parameters (e.g. introducing 2′-mofications, base modifications, backbone modifications, terminal cap modifications etc). The modified construct in tested in an appropriate system (e.g. human serum for nuclease resistance, shown, or an animal model for PK/delivery parameters). In parallel, the siNA construct is tested for RNAi activity, for example in a cell culture system such as a luciferase reporter assay). Lead siNA constructs are then identified which possess a particular characteristic while maintaining RNAi activity, and can be further modified and assayed once again. This same approach can be used to identify siNA-conjugate molecules with improved pharmacokinetic profiles, delivery, and RNAi activity.

[0335] FIG. 12 shows non-limiting examples of phosphorylated siNA molecules of the invention, including linear and duplex constructs and asymmetric derivatives thereof.

[0336] FIG. 13 shows non-limiting examples of chemically modified terminal phosphate groups of the invention.

[0337] FIG. 14A shows a non-limiting example of methodology used to design self complementary DFO constructs utilizing palindrome and/or repeat nucleic acid sequences that are identified in a target nucleic acid sequence. (i) A palindrome or repeat sequence is identified in a nucleic acid target sequence. (ii) A sequence is designed that is complementary to the target nucleic acid sequence and the palindrome sequence. (iii) An inverse repeat sequence of the non-palindrome/repeat portion of the complementary sequence is appended to the 3′-end of the complementary sequence to generate a self complementary DFO molecule comprising sequence complementary to the nucleic acid target. (iv) The DFO molecule can self-assemble to form a double stranded oligonucleotide. FIG. 14B shows a non-limiting representative example of a duplex forming oligonucleotide sequence. FIG. 14C shows a non-limiting example of the self assembly schematic of a representative duplex forming oligonucleotide sequence. FIG. 14D shows a non-limiting example of the self assembly schematic of a representative duplex forming oligonucleotide sequence followed by interaction with a target nucleic acid sequence resulting in modulation of gene expression.

[0338] FIG. 15 shows a non-limiting example of the design of self complementary DFO constructs utilizing palindrome and/or repeat nucleic acid sequences that are incorporated into the DFO constructs that have sequence complementary to any target nucleic acid sequence of interest. Incorporation of these palindrome/repeat sequences allow the design of DFO constructs that form duplexes in which each strand is capable of mediating modulation of target gene expression, for example by RNAi. First, the target sequence is identified. A complementary sequence is then generated in which nucleotide or non-nucleotide modifications (shown as X or Y) are introduced into the complementary sequence that generate an artificial palindrome (shown as XYXYXY in the Figure). An inverse repeat of the non-palindrome/repeat complementary sequence is appended to the 3′-end of the complementary sequence to generate a self complementary DFO comprising sequence complementary to the nucleic acid target. The DFO can self-assemble to form a double stranded oligonucleotide.

[0339] FIG. 16 shows non-limiting examples of multifunctional siNA molecules of the invention comprising two separate polynucleotide sequences that are each capable of mediating RNAi directed cleavage of differing target nucleic acid sequences. FIG. 16A shows a non-limiting example of a multifunctional siNA molecule having a first region that is complementary to a first target nucleic acid sequence (complementary region 1) and a second region that is complementary to a second target nucleic acid sequence (complementary region 2), wherein the first and second complementary regions are situated at the 3′-ends of each polynucleotide sequence in the multifunctional siNA. The dashed portions of each polynucleotide sequence of the multifunctional siNA construct have complementarity with regard to corresponding portions of the siNA duplex, but do not have complementarity to the target nucleic acid sequences. FIG. 16B shows a non-limiting example of a multifunctional siNA molecule having a first region that is complementary to a first target nucleic acid sequence (complementary region 1) and a second region that is complementary to a second target nucleic acid sequence (complementary region 2), wherein the first and second complementary regions are situated at the 5′-ends of each polynucleotide sequence in the multifunctional siNA. The dashed portions of each polynucleotide sequence of the multifunctional siNA construct have complementarity with regard to corresponding portions of the siNA duplex, but do not have complementarity to the target nucleic acid sequences.

[0340] FIG. 17 shows non-limiting examples of multifunctional siNA molecules of the invention comprising a single polynucleotide sequence comprising distinct regions that are each capable of mediating RNAi directed cleavage of differing target nucleic acid sequences. FIG. 17A shows a non-limiting example of a multifunctional siNA molecule having a first region that is complementary to a first target nucleic acid sequence (complementary region 1) and a second region that is complementary to a second target nucleic acid sequence (complementary region 2), wherein the second complementary region is situated at the 3′-end of the polynucleotide sequence in the multifunctional siNA. The dashed portions of each polynucleotide sequence of the multifunctional siNA construct have complementarity with regard to corresponding portions of the siNA duplex, but do not have complementarity to the target nucleic acid sequences. FIG. 17B shows a non-limiting example of a multifunctional siNA molecule having a first region that is complementary to a first target nucleic acid sequence (complementary region 1) and a second region that is complementary to a second target nucleic acid sequence (complementary region 2), wherein the first complementary region is situated at the 5′-end of the polynucleotide sequence in the multifunctional siNA. The dashed portions of each polynucleotide sequence of the multifunctional siNA construct have complementarity with regard to corresponding portions of the siNA duplex, but do not have complementarity to the target nucleic acid sequences. In one embodiment, these multifunctional siNA constructs are processed in vivo or in vitro to generate multifunctional siNA constructs as shown in FIG. 16.

[0341] FIG. 18 shows non-limiting examples of multifunctional siNA molecules of the invention comprising two separate polynucleotide sequences that are each capable of mediating RNAi directed cleavage of differing target nucleic acid sequences and wherein the multifunctional siNA construct further comprises a self complementary, palindrome, or repeat region, thus enabling shorter bifuctional siNA constructs that can mediate RNA interference against differing target nucleic acid sequences. FIG. 18A shows a non-limiting example of a multifunctional siNA molecule having a first region that is complementary to a first target nucleic acid sequence (complementary region 1) and a second region that is complementary to a second target nucleic acid sequence (complementary region 2), wherein the first and second complementary regions are situated at the 3′-ends of each polynucleotide sequence in the multifunctional siNA, and wherein the first and second complementary regions further comprise a self complementary, palindrome, or repeat region. The dashed portions of each polynucleotide sequence of the multifunctional siNA construct have complementarity with regard to corresponding portions of the siNA duplex, but do not have complementarity to the target nucleic acid sequences. FIG. 18B shows a non-limiting example of a multifunctional siNA molecule having a first region that is complementary to a first target nucleic acid sequence (complementary region 1) and a second region that is complementary to a second target nucleic acid sequence (complementary region 2), wherein the first and second complementary regions are situated at the 5′-ends of each polynucleotide sequence in the multifunctional siNA, and wherein the first and second complementary regions further comprise a self complementary, palindrome, or repeat region. The dashed portions of each polynucleotide sequence of the multifunctional siNA construct have complementarity with regard to corresponding portions of the siNA duplex, but do not have complementarity to the target nucleic acid sequences.

[0342] FIG. 19 shows non-limiting examples of multifunctional siNA molecules of the invention comprising a single polynucleotide sequence comprising distinct regions that are each capable of mediating RNAi directed cleavage of differing target nucleic acid sequences and wherein the multifunctional siNA construct further comprises a self complementary, palindrome, or repeat region, thus enabling shorter bifuctional siNA constructs that can mediate RNA interference against differing target nucleic acid sequences. FIG. 19A shows a non-limiting example of a multifunctional siNA molecule having a first region that is complementary to a first target nucleic acid sequence (complementary region 1) and a second region that is complementary to a second target nucleic acid sequence (complementary region 2), wherein the second complementary region is situated at the 3′-end of the polynucleotide sequence in the multifunctional siNA, and wherein the first and second complementary regions further comprise a self complementary, palindrome, or repeat region. The dashed portions of each polynucleotide sequence of the multifunctional siNA construct have complementarity with regard to corresponding portions of the siNA duplex, but do not have complementarity to the target nucleic acid sequences. FIG. 19B shows a non-limiting example of a multifunctional siNA molecule having a first region that is complementary to a first target nucleic acid sequence (complementary region 1) and a second region that is complementary to a second target nucleic acid sequence (complementary region 2), wherein the first complementary region is situated at the 5′-end of the polynucleotide sequence in the multifunctional siNA, and wherein the first and second complementary regions further comprise a self complementary, palindrome, or repeat region. The dashed portions of each polynucleotide sequence of the multifunctional siNA construct have complementarity with regard to corresponding portions of the siNA duplex, but do not have complementarity to the target nucleic acid sequences. In one embodiment, these multifunctional siNA constructs are processed in vivo or in vitro to generate multifunctional siNA constructs as shown in FIG. 18.

[0343] FIG. 20 shows a non-limiting example of how multifunctional siNA molecules of the invention can target two separate target nucleic acid molecules, such as separate RNA molecules encoding differing proteins, for example, a cytokine and its corresponding receptor, differing viral strains, a virus and a cellular protein involved in viral infection or replication, or differing proteins involved in a common or divergent biologic pathway that is implicated in the maintenance of progression of disease. Each strand of the multifunctional siNA construct comprises a region having complementarity to separate target nucleic acid molecules. The multifunctional siNA molecule is designed such that each strand of the siNA can be utilized by the RISC complex to initiate RNA interference mediated cleavage of its corresponding target. These design parameters can include destabilization of each end of the siNA construct (see for example Schwarz et al., 2003, Cell, 115, 199-208). Such destabilization can be accomplished for example by using guanosine-cytidine base pairs, alternate base pairs (e.g., wobbles), or destabilizing chemically modified nucleotides at terminal nucleotide positions as is known in the art.

[0344] FIG. 21 shows a non-limiting example of how multifunctional siNA molecules of the invention can target two separate target nucleic acid sequences within the same target nucleic acid molecule, such as alternate coding regions of a RNA, coding and non-coding regions of a RNA, or alternate splice variant regions of a RNA. Each strand of the multifunctional siNA construct comprises a region having complementarity to the separate regions of the target nucleic acid molecule. The multifunctional siNA molecule is designed such that each strand of the siNA can be utilized by the RISC complex to initiate RNA interference mediated cleavage of its corresponding target region. These design parameters can include destabilization of each end of the siNA construct (see for example Schwarz et aL, 2003, Cell, 115, 199-208). Such destabilization can be accomplished for example by using guanosine-cytidine base pairs, alternate base pairs (e.g., wobbles), or destabilizing chemically modified nucleotides at terminal nucleotide positions as is known in the art.

[0345] FIG. 22(A-H) shows non-limiting examples of tethered multifunctional siNA constructs of the invention. In the examples shown, a linker (e.g., nucleotide or non-nucleotide linker) connects two siNA regions (e.g., two sense, two antisense, or alternately a sense and an antisense region together. Separate sense (or sense and antisense) sequences corresponding to a first target sequence and second target sequence are hybridized to their corresponding sense and/or antisense sequences in the multifunctional siNA. In addition, various conjugates, ligands, aptamers, polymers or reporter molecules can be attached to the linker region for selective or improved delivery and/or pharmacokinetic properties.

[0346] FIG. 23 shows a non-limiting example of various dendrimer based multifunctional siNA designs.

[0347] FIG. 24 shows a non-limiting example of various supramolecular multifunctional siNA designs.

[0348] FIG. 25 shows a non-limiting example of a dicer enabled multifunctional siNA design using a 30 nucleotide precursor siNA construct. A 30 base pair duplex is cleaved by Dicer into 22 and 8 base pair products from either end (8 b.p. fragments not shown). For ease of presentation the overhangs generated by dicer are not shown—but can be compensated for. Three targeting sequences are shown. The required sequence identity overlapped is indicated by grey boxes. The N's of the parent 30 b.p. siNA are suggested sites of 2′-OH positions to enable Dicer cleavage if this is tested in stabilized chemistries. Note that processing of a 30 mer duplex by Dicer RNase III does not give a precise 22+8 cleavage, but rather produces a series of closely related products (with 22+8 being the primary site). Therefore, processing by Dicer will yield a series of active siNAs.

[0349] FIG. 26 shows a non-limiting example of a dicer enabled multifunctional siNA design using a 40 nucleotide precursor siNA construct. A 40 base pair duplex is cleaved by Dicer into 20 base pair products from either end. For ease of presentation the overhangs generated by dicer are not shown—but can be compensated for. Four targeting sequences are shown. The target sequences having homology are enclosed by boxes. This design format can be extended to larger RNAs. If chemically stabilized siNAs are bound by Dicer, then strategically located ribonucleotide linkages can enable designer cleavage products that permit our more extensive repertoire of multiifunctional designs. For example cleavage products not limited to the Dicer standard of approximately 22-nucleotides can allow multifunctional siNA constructs with a target sequence identity overlap ranging from, for example, about 3 to about 15 nucleotides.

[0350] FIG. 27 shows a non-limiting example of additional multifunctional siNA construct designs of the invention. In one example, a conjugate, ligand, aptamer, label, or other moiety is attached to a region of the multifunctional siNA to enable improved delivery or pharmacokinetic profiling.

[0351] FIG. 28 shows a non-limiting example of additional multifunctional siNA construct designs of the invention. In one example, a conjugate, ligand, aptamer, label, or other moiety is attached to a region of the multifunctional siNA to enable improved delivery or pharmacokinetic profiling.

[0352] FIG. 29 shows a non-limiting example of a cholesterol linked phosphoramidite that can be used to synthesize cholesterol conjugated siNA molecules of the invention. An example is shown with the cholesterol moiety linked to the 5′-end of the sense strand of a siNA molecule.

### DETAILED DESCRIPTION OF THE INVENTION

Mechanism of Action of Nucleic Acid Molecules of the Invention

[0353] The discussion that follows discusses the proposed mechanism of RNA interference mediated by short interfering RNA as is presently known, and is not meant to be limiting and is not an admission of prior art. Applicant demonstrates herein that chemically-modified short interfering nucleic acids possess similar or improved capacity to mediate RNAi as do siRNA molecules and are expected to possess improved stability and activity in vivo; therefore, this discussion is not meant to be limiting only to siRNA and can be applied to siNA as a whole. By “improved capacity to mediate RNAi” or “improved RNAi activity” is meant to include RNAi activity measured in vitro and/or in vivo where the RNAi activity is a reflection of both the ability of the siNA to mediate RNAi and the stability of the siNAs of the invention. In this invention, the product of these activities can be increased in vitro and/or in vivo compared to an all RNA siRNA or a siNA containing a plurality of ribonucleotides. In some cases, the activity or stability of the siNA molecule can be decreased (i.e., less than ten-fold), but the overall activity of the siNA molecule is enhanced in vitro and/or in vivo.

[0354] RNA interference refers to the process of sequence specific post-transcriptional gene silencing in animals mediated by short interfering RNAs (siRNAs) (Fire et al., 1998, Nature, 391, 806). The corresponding process in plants is commonly referred to as post-transcriptional gene silencing or RNA silencing and is also referred to as quelling in fungi. The process of post-transcriptional gene silencing is thought to be an evolutionarily-conserved cellular defense mechanism used to prevent the expression of foreign genes which is commonly shared by diverse flora and phyla (Fire et al., 1999, Trends Genet., 15, 358). Such protection from foreign gene expression may have evolved in response to the production of double-stranded RNAs (dsRNAs) derived from viral infection or the random integration of transposon elements into a host genome via a cellular response that specifically destroys homologous single-stranded RNA or viral genomic RNA. The presence of dsRNA in cells triggers the RNAi response though a mechanism that has yet to be fully characterized. This mechanism appears to be different from the interferon response that results from dsRNA-mediated activation of protein kinase PKR and 2′, 5′-oligoadenylate synthetase resulting in non-specific cleavage of mRNA by ribonuclease L.

[0355] The presence of long dsRNAs in cells stimulates the activity of a ribonuclease III enzyme referred to as Dicer. Dicer is involved in the processing of the dsRNA into short pieces of dsRNA known as short interfering RNAs (siRNAs) (Berstein et al., 2001, Nature, 409, 363). Short interfering RNAs derived from Dicer activity are typically about 21 to about 23 nucleotides in length and comprise about 19 base pair duplexes. Dicer has also been implicated in the excision of 21- and 22-nucleotide small temporal RNAs (stRNAs) from precursor RNA of conserved structure that are implicated in translational control (Hutvagner et al., 2001, Science, 293, 834). The RNAi response also features an endonuclease complex containing a siRNA, commonly referred to as an RNA-induced silencing complex (RISC), which mediates cleavage of single-stranded RNA having sequence homologous to the siRNA. Cleavage of the target RNA takes place in the middle of the region complementary to the guide sequence of the siRNA duplex (Elbashir et al., 2001, Genes Dev., 15, 188). In addition, RNA interference can also involve small RNA (e.g., micro-RNA or miRNA) mediated gene silencing, presumably though cellular mechanisms that regulate chromatin structure and thereby prevent transcription of target gene sequences (see for example Allshire, 2002, Science, 297, 1818-1819; Volpe et al., 2002, Science, 297, 1833-1837; Jenuwein, 2002, Science, 297, 2215-2218; and Hall et al., 2002, Science, 297, 2232-2237). As such, siNA molecules of the invention can be used to mediate gene silencing via interaction with RNA transcripts or alternately by interaction with particular gene sequences, wherein such interaction results in gene silencing either at the transcriptional level or post-transcriptional level.

[0356] RNAi has been studied in a variety of systems. Fire et al., 1998, Nature, 391, 806, were the first to observe RNAi in C. elegans. Wianny and Goetz, 1999, Nature Cell Biol., 2, 70, describe RNAi mediated by dsRNA in mouse embryos. Hammond et al., 2000, Nature, 404, 293, describe RNAi in Drosophila cells transfected with dsRNA. Elbashir et al., 2001, Nature, 411, 494, describe RNAi induced by introduction of duplexes of synthetic 21-nucleotide RNAs in cultured mammalian cells including human embryonic kidney and HeLa cells. Recent work in Drosophila embryonic lysates has revealed certain requirements for siRNA length, structure, chemical composition, and sequence that are essential to mediate efficient RNAi activity. These studies have shown that 21 nucleotide siRNA duplexes are most active when containing two 2-nucleotide 3′-terminal nucleotide overhangs. Furthermore, substitution of one or both siRNA strands with 2′-deoxy or 2′-O-methyl nucleotides abolishes RNAi activity, whereas substitution of 3′-terminal siRNA nucleotides with deoxy nucleotides was shown to be tolerated. Mismatch sequences in the center of the siRNA duplex were also shown to abolish RNAi activity. In addition, these studies also indicate that the position of the cleavage site in the target RNA is defined by the 5′-end of the siRNA guide sequence rather than the 3′-end (Elbashir et al., 2001, EMBO J, 20, 6877). Other studies have indicated that a 5′-phosphate on the target-complementary strand of a siRNA duplex is required for siRNA activity and that ATP is utilized to maintain the 5′-phosphate moiety on the siRNA (Nykanen et al., 2001, Cell, 107, 309); however, siRNA molecules lacking a 5′-phosphate are active when introduced exogenously, suggesting that 5′-phosphorylation of siRNA constructs may occur in vivo.

Duplex Forming Oligonucleotides (DFO) of the Invention

[0357] In one embodiment, the invention features siNA molecules comprising duplex forming oligonucleotides (DFO) that can self-assemble into double stranded oligonucleotides. The duplex forming oligonucleotides of the invention can be chemically synthesized or expressed from transcription units and/or vectors. The DFO molecules of the instant invention provide useful reagents and methods for a variety of therapeutic, diagnostic, agricultural, veterinary, target validation, genomic discovery, genetic engineering and pharmacogenomic applications.

[0358] Applicant demonstrates herein that certain oligonucleotides, refered to herein for convenience but not limitation as duplex forming oligonucleotides or DFO molecules, are potent mediators of sequence specific regulation of gene expression. The oligonucleotides of the invention are distinct from other nucleic acid sequences known in the art (e.g., siRNA, miRNA, stRNA, shRNA, antisense oligonucleotides etc.) in that they represent a class of linear polynucleotide sequences that are designed to self-assemble into double stranded oligonucleotides, where each strand in the double stranded oligonucleotides comprises a nucleotide sequence that is complementary to a target nucleic acid molecule. Nucleic acid molecules of the invention can thus self assemble into functional duplexes in which each strand of the duplex comprises the same polynucleotide sequence and each strand comprises a nucleotide sequence that is complementary to a target nucleic acid molecule.

[0359] Generally, double stranded oligonucleotides are formed by the assembly of two distinct oligonucleotide sequences where the oligonucleotide sequence of one strand is complementary to the oligonucleotide sequence of the second strand; such double stranded oligonucleotides are assembled from two separate oligonucleotides, or from a single molecule that folds on itself to form a double stranded structure, often referred to in the field as hairpin stem-loop structure (e.g., shRNA or short hairpin RNA). These double stranded oligonucleotides known in the art all have a common feature in that each strand of the duplex has a distict nucleotide sequence.

[0360] Distinct from the double stranded nucleic acid molecules known in the art, the applicants have developed a novel, potentially cost effective and simplified method of forming a double stranded nucleic acid molecule starting from a single stranded or linear oligonucleotide. The two strands of the double stranded oligonucleotide formed according to the instant invention have the same nucleotide sequence and are not covalently linked to each other. Such double-stranded oligonucleotides molecules can be readily linked post-synthetically by methods and reagents known in the art and are within the scope of the invention. In one embodiment, the single stranded oligonucleotide of the invention (the duplex forming oligonucleotide) that forms a double stranded oligonucleotide comprises a first region and a second region, where the second region includes a nucleotide sequence that is an inverted repeat of the nucleotide sequence in the first region, or a portion thereof, such that the single stranded oligonucleotide self assembles to form a duplex oligonucleotide in which the nucleotide sequence of one strand of the duplex is the same as the nucleotide sequence of the second strand. Non-limiting examples of such duplex forming oligonucleotides are illustrated in FIGS. 14 and 15. These duplex forming oligonucleotides (DFOs) can optionally include certain palindrome or repeat sequences where such palindrome or repeat sequences are present in between the first region and the second region of the DFO.

[0361] In one embodiment, the invention features a duplex forming oligonucleotide (DFO) molecule, wherein the DFO comprises a duplex forming self complementary nucleic acid sequence that has nucleotide sequence complementary to a target nucleic acid sequence. The DFO molecule can comprise a single self complementary sequence or a duplex resulting from assembly of such self complementary sequences.

[0362] In one embodiment, a duplex forming oligonucleotide (DFO) of the invention comprises a first region and a second region, wherein the second region comprises a nucleotide sequence comprising an inverted repeat of nucleotide sequence of the first region such that the DFO molecule can assemble into a double stranded oligonucleotide. Such double stranded oligonucleotides can act as a short interfering nucleic acid (siNA) to modulate gene expression. Each strand of the double stranded oligonucleotide duplex formed by DFO molecules of the invention can comprise a nucleotide sequence region that is complementary to the same nucleotide sequence in a target nucleic acid molecule (e.g., influenza or host target RNA).

[0363] In one embodiment, the invention features a single stranded DFO that can assemble into a double stranded oligonucleotide. The applicant has surprisingly found that a single stranded oligonucleotide with nucleotide regions of self complementarity can readily assemble into duplex oligonucleotide constructs. Such DFOs can assemble into duplexes that can inhibit gene expression in a sequence specific manner. The DFO moleucles of the invention comprise a first region with nucleotide sequence that is complementary to the nucleotide sequence of a second region and where the sequence of the first region is complementary to a target nucleic acid (e.g., RNA). The DFO can form a double stranded oligonucleotide wherein a portion of each strand of the double stranded oligonucleotide comprises a sequence complementary to a target nucleic acid sequence (e.g., influenza or host target RNA).

[0364] In one embodiment, the invention features a double stranded oligonucleotide, wherein the two strands of the double stranded oligonucleotide are not covalently linked to each other, and wherein each strand of the double stranded oligonucleotide comprises a nucleotide sequence that is complementary to the same nucleotide sequence in a target nucleic acid molecule or a portion thereof (e.g., influenza RNA target). In another embodiment, the two strands of the double stranded oligonucleotide share an identical nucleotide sequence of at least about 15, preferably at least about 16, 17, 18, 19, 20, or 21 nucleotides.

[0365] In one embodiment, a DFO molecule of the invention comprises a structure having Formula DFO-I:

5′-p-X Z X′-3′

wherein Z comprises a palindromic or repeat nucleic acid sequence optionally with one or more modified nucleotides (e.g., nucleotide with a modified base, such as 2-amino purine, 2-amino-1,6-dihydro purine or a universal base), for example of length about 2 to about 24 nucleotides in even numbers (e.g., about 2, 4, 6, 8, 10, 12, 14, 16, 18, 20, or 22 or 24 nucleotides), X represents a nucleic acid sequence, for example of length of about 1 to about 21 nucleotides (e.g., about 1, 2, 3, 4, 5, 6, 7, 8, 9, 10, 11, 12, 13, 14, 15, 16, 17, 18, 19, 20, or 21 nucleotides), X′ comprises a nucleic acid sequence, for example of length about 1 and about 21 nucleotides (e.g., about 1, 2, 3, 4, 5, 6, 7, 8, 9, 10, 11, 12, 13, 14, 15, 16, 17, 18, 19, 20 or 21 nucleotides) having nucleotide sequence complementarity to sequence X or a portion thereof, p comprises a terminal phosphate group that can be present or absent, and wherein sequence X and Z, either independently or together, comprise nucleotide sequence that is complementary to a target nucleic acid sequence or a portion thereof and is of length sufficient to interact (e.g., base pair) with the target nucleic acid sequence or a portion thereof (e.g., influenza RNA target). For example, X independently can comprise a sequence from about 12 to about 21 or more (e.g., about 12, 13, 14, 15, 16, 17, 18, 19, 20, 21, or more) nucleotides in length that is complementary to nucleotide sequence in a target target RNA or a portion thereof. In another non-limiting example, the length of the nucleotide sequence of X and Z together, when X is present, that is complementary to the target RNA or a portion thereof (e.g., influenza RNA target) is from about 12 to about 21 or more nucleotides (e.g., about 12, 13, 14, 15, 16, 17, 18, 19, 20, 21, or more). In yet another non-limiting example, when X is absent, the length of the nucleotide sequence of Z that is complementary to the target target RNA or a portion thereof is from about 12 to about 24 or more nucleotides (e.g., about 12, 14, 16, 18, 20, 22, 24, or more). In one embodiment X, Z and X′ are independently oligonucleotides, where X and/or Z comprises a nucleotide sequence of length sufficient to interact (e.g., base pair) with a nucleotide sequence in the target RNA or a portion thereof (e.g., influenza RNA target). In one embodiment, the lengths of oligonucleotides X and X′ are identical. In another embodiment, the lengths of oligonucleotides X and X′ are not identical. In another embodiment, the lengths of oligonucleotides X and Z, or Z and X′, or X, Z and X′ are either identical or different.

[0366] When a sequence is described in this specification as being of “sufficient” length to interact (i.e., base pair) with another sequence, it is meant that the the length is such that the number of bonds (e.g., hydrogen bonds) formed between the two sequences is enough to enable the two sequence to form a duplex under the conditions of interest. Such conditions can be in vitro (e.g., for diagnostic or assay purposes) or in vivo (e.g., for therapeutic purposes). It is a simple and routine matter to determine such lengths.

[0367] In one embodiment, the invention features a double stranded oligonucleotide construct having Formula DFO-I(a):

5′-p-X Z X′-3′
3′-X′ Z X-p-5′

wherein Z comprises a palindromic or repeat nucleic acid sequence or palindromic or repeat-like nucleic acid sequence with one or more modified nucleotides (e.g., nucleotides with a modified base, such as 2-amino purine, 2-amino-1,6-dihydro purine or a universal base), for example of length about 2 to about 24 nucleotides in even numbers (e.g., about 2, 4, 6, 8, 10, 12, 14, 16, 18, 20, 22 or 24 nucleotides), X represents a nucleic acid sequence, for example of length about 1 to about 21 nucleotides (e.g., about 1, 2, 3, 4, 5, 6, 7, 8, 9, 10, 11, 12, 13, 14, 15, 16, 17, 18, 19, 20, or 21 nucleotides), X′ comprises a nucleic acid sequence, for example of length about 1 to about 21 nucleotides (e.g., about 1, 2, 3, 4, 5, 6, 7, 8, 9, 10, 11, 12, 13, 14, 15, 16, 17, 18, 19, 20 or 21 nucleotides) having nucleotide sequence complementarity to sequence X or a portion thereof, p comprises a terminal phosphate group that can be present or absent, and wherein each X and Z independently comprises a nucleotide sequence that is complementary to a target nucleic acid sequence or a portion thereof (e.g., influenza RNA target) and is of length sufficient to interact with the target nucleic acid sequence of a portion thereof (e.g., influenza RNA target). For example, sequence X independently can comprise a sequence from about 12 to about 21 or more nucleotides (e.g., about 12, 13, 14, 15, 16, 17, 18, 19, 20, 21, or more) in length that is complementary to a nucleotide sequence in a target RNA or a portion thereof (e.g., influenza RNA target). In another non-limiting example, the length of the nucleotide sequence of X and Z together (when X is present) that is complementary to the target target RNA or a portion thereof is from about 12 to about 21 or more nucleotides (e.g., about 12, 13, 14, 15, 16, 17, 18, 19, 20, 21, or more). In yet another non-limiting example, when X is absent, the length of the nucleotide sequence of Z that is complementary to the target target RNA or a portion thereof is from about 12 to about 24 or more nucleotides (e.g., about 12, 14, 16, 18, 20, 22, 24 or more). In one embodiment X, Z and X′ are independently oligonucleotides, where X and/or Z comprises a nucleotide sequence of length sufficient to interact (e.g., base pair) with nucleotide sequence in the target RNA or a portion thereof (e.g., influenza RNA target). In one embodiment, the lengths of oligonucleotides X and X′ are identical. In another embodiment, the lengths of oligonucleotides X and X′ are not identical. In another embodiment, the lengths of oligonucleotides X and Z or Z and X′ or X, Z and X′ are either identical or different. In one embodiment, the double stranded oligonucleotide construct of Formula I(a) includes one or more, specifically 1, 2, 3 or 4, mismatches, to the extent such mismatches do not significantly diminish the ability of the double stranded oligonucleotide to inhibit target gene expression.

[0368] In one embodiment, a DFO molecule of the invention comprises structure having Formula DFO-II:

5′-p-X X′-3′

wherein each X and X′ are independently oligonucleotides of length about 12 nucleotides to about 21 nucleotides, wherein X comprises, for example, a nucleic acid sequence of length about 12 to about 21 nucleotides (e.g., about 12, 13, 14, 15, 16, 17, 18, 19, 20 or 21 nucleotides), X′ comprises a nucleic acid sequence, for example of length about 12 to about 21 nucleotides (e.g., about 12, 13, 14, 15, 16, 17, 18, 19, 20, or 21 nucleotides) having nucleotide sequence complementarity to sequence X or a portion thereof, p comprises a terminal phosphate group that can be present or absent, and wherein X comprises a nucleotide sequence that is complementary to a target nucleic acid sequence (e.g., target RNA) or a portion thereof and is of length sufficient to interact (e.g., base pair) with the target nucleic acid sequence of a portion thereof. In one embodiment, the length of oligonucleotides X and X′ are identical. In another embodiment the length of oligonucleotides X and X′ are not identical. In one embodiment, length of the oligonucleotides X and X′ are sufficint to form a relatively stable double stranded oligonucleotide.

[0369] In one embodiment, the invention features a double stranded oligonucleotide construct having Formula DFO-II(a):

5′-p-X X′-3′
3′-X′ X-p-5′

wherein each X and X′ are independently oligonucleotides of length about 12 nucleotides to about 21 nucleotides, wherein X comprises a nucleic acid sequence, for example of length about 12 to about 21 nucleotides (e.g., about 12, 13, 14, 15, 16, 17, 18, 19, 20 or 21 nucleotides), X′ comprises a nucleic acid sequence, for example of length about 12 to about 21 nucleotides (e.g., about 12, 13, 14, 15, 16, 17, 18, 19, 20 or 21 nucleotides) having nucleotide sequence complementarity to sequence X or a portion thereof, p comprises a terminal phosphate group that can be present or absent, and wherein X comprises nucleotide sequence that is complementary to a target nucleic acid sequence or a portion thereof (e.g., influenza RNA target) and is of length sufficient to interact (e.g., base pair) with the target nucleic acid sequence (e.g., target RNA) or a portion thereof. In one embodiment, the lengths of oligonucleotides X and X′ are identical. In another embodiment, the lengths of oligonucleotides X and X′ are not identical. In one embodiment, the lengths of the oligonucleotides X and X′ are sufficint to form a relatively stable double stranded oligonucleotide. In one embodiment, the double stranded oligonucleotide construct of Formula 11(a) includes one or more, specifically 1, 2, 3 or 4, mismatches, to the extent such mismatches do not significantly diminish the ability of the double stranded oligonucleotide to inhibit target gene expression.

[0370] In one embodiment, the invention features a DFO molecule having Formula DFO-I(b):

5′-p-Z-3′

where Z comprises a palindromic or repeat nucleic acid sequence optionally including one or more non-standard or modified nucleotides (e.g., nucleotide with a modified base, such as 2-amino purine or a universal base) that can facilitate base-pairing with other nucleotides. Z can be, for example, of length sufficient to interact (e.g., base pair) with nucleotide sequence of a target nucleic acid (e.g., influenza RNA target) molecule, preferably of length of at least 12 nucleotides, specifically about 12 to about 24 nucleotides (e.g., about 12, 14, 16, 18, 20, 22 or 24 nucleotides). p represents a terminal phosphate group that can be present or absent.

[0371] In one embodiment, a DFO molecule having any of Formula DFO-I, DFO-I(a), DFO-I(b), DFO-II(a) or DFO-II can comprise chemical modifications as described herein without limitation, such as, for example, nucleotides having any of Formulae I-VII, stabilization chemistries as described in Table IV, or any other combination of modified nucleotides and non-nucleotides as described in the various embodiments herein.

[0372] In one embodiment, the palidrome or repeat sequence or modified nucleotide (e.g., nucleotide with a modified base, such as 2-amino purine or a universal base) in Z of DFO constructs having Formula DFO-I, DFO-I(a) and DFO-I(b), comprises chemically modified nucleotides that are able to interact with a portion of the target nucleic acid sequence (e.g., modified base analogs that can form Watson Crick base pairs or non-Watson Crick base pairs).

[0373] In one embodiment, a DFO molecule of the invention, for example a DFO having Formula DFO-I or DFO-II, comprises about 15 to about 40 nucleotides (e.g., about 15, 16, 17, 18, 19, 20, 21, 22, 23, 24, 25, 26, 27, 28, 29, 30, 31, 32, 33, 34, 35, 36, 37, 38, 39, or 40 nucleotides). In one embodiment, a DFO molecule of the invention comprises one or more chemical modifications. In a non-limiting example, the introduction of chemically modified nucleotides and/or non-nucleotides into nucleic acid molecules of the invention provides a powerful tool in overcoming potential limitations of in vivo stability and bioavailability inherent to unmodified RNA molecules that are delivered exogenously. For example, the use of chemically modified nucleic acid molecules can enable a lower dose of a particular nucleic acid molecule for a given therapeutic effect since chemically modified nucleic acid molecules tend to have a longer half-life in serum or in cells or tissues. Furthermore, certain chemical modifications can improve the bioavailability and/or potency of nucleic acid molecules by not only enhancing half-life but also facilitating the targeting of nucleic acid molecules to particular organs, cells or tissues and/or improving cellular uptake of the nucleic acid molecules. Therefore, even if the activity of a chemically modified nucleic acid molecule is reduced in vitro as compared to a native/unmodified nucleic acid molecule, for example when compared to an unmodified RNA molecule, the overall activity of the modified nucleic acid molecule can be greater than the native or unmodified nucleic acid molecule due to improved stability, potency, duration of effect, bioavailability and/or delivery of the molecule.

Multifunctional or Multi-targeted siNA Molecules of the Invention

[0374] In one embodiment, the invention features siNA molecules comprising multifunctional short interfering nucleic acid (multifunctional siNA) molecules that modulate the expression of one or more genes in a biologic system, such as a cell, tissue, or organism. The multifunctional short interfering nucleic acid (multifunctional siNA) molecules of the invention can target more than one region a target nucleic acid sequence or can target sequences of more than one distinct target nucleic acid molecules. The multifunctional siNA molecules of the invention can be chemically synthesized or expressed from transcription units and/or vectors. The multifunctional siNA molecules of the instant invention provide useful reagents and methods for a variety of human applications, therapeutic, cosmetic, diagnostic, agricultural, veterinary, target validation, genomic discovery, genetic engineering and pharmacogenomic applications.

[0375] Applicant demonstrates herein that certain oligonucleotides, refered to herein for convenience but not limitation as multifunctional short interfering nucleic acid or multifunctional siNA molecules, are potent mediators of sequence specific regulation of gene expression. The multifunctional siNA molecules of the invention are distinct from other nucleic acid sequences known in the art (e.g., siRNA, miRNA, stRNA, shRNA, antisense oligonucleotides, etc.) in that they represent a class of polynucleotide molecules that are designed such that each strand in the multifunctional siNA construct comprises a nucleotide sequence that is complementary to a distinct nucleic acid sequence in one or more target nucleic acid molecules. A single multifunctional siNA molecule (generally a double-stranded molecule) of the invention can thus target more than one (e.g., 2, 3, 4, 5, or more) differing target nucleic acid target molecules. Nucleic acid molecules of the invention can also target more than one (e.g., 2, 3, 4, 5, or more) region of the same target nucleic acid sequence. As such multifunctional siNA molecules of the invention are useful in down regulating or inhibiting the expression of one or more target nucleic acid molecules. By reducing or inhibiting expression of more than one target nucleic acid molecule with one multifunctional siNA construct, multifunctional siNA molecules of the invention represent a class of potent therapeutic agents that can provide simultaneous inhibition of multiple targets within a disease or pathogen related pathway. Such simultaneous inhibition can provide synergistic therapeutic treatment strategies without the need for separate preclinical and clinical development efforts or complex regulatory approval process.

[0376] Use of multifunctional siNA molecules that target more then one region of a target nucleic acid molecule (e.g., influenza or host RNA or DNA) is expected to provide potent inhibition of gene expression. For example, a single multifunctional siNA construct of the invention can target both conserved and variable regions of a target nucleic acid molecule, such as a target RNA or DNA, thereby allowing down regulation or inhibition of different splice variants encoded by a single host gene, different subtypes of influenza, or allowing for targeting of both coding and non-coding regions of a target nucleic acid molecule (e.g., influenza or host RNA or DNA target).

[0377] Generally, double stranded oligonucleotides are formed by the assembly of two distinct oligonucleotides where the oligonucleotide sequence of one strand is complementary to the oligonucleotide sequence of the second strand; such double stranded oligonucleotides are generally assembled from two separate oligonucleotides (e.g., siRNA). Alternately, a duplex can be formed from a single molecule that folds on itself (e.g., shRNA or short hairpin RNA). These double stranded oligonucleotides are known in the art to mediate RNA interference and all have a common feature wherein only one nucleotide sequence region (guide sequence or the antisense sequence) has complementarity to a target nucleic acid sequence, and the other strand (sense sequence) comprises nucleotide sequence that is homologous to the target nucleic acid sequence. Generally, the antisense sequence is retained in the active RISC complex and guides the RISC to the target nucleotide sequence by means of complementary base-pairing of the antisense sequence with the target seqeunce for mediating sequence-specific RNA interference. It is known in the art that in some cell culture systems, certain types of unmodified siRNAs can exhibit “off target” effects. It is hypothesized that this off-target effect involves the participation of the sense sequence instead of the antisense sequence of the siRNA in the RISC complex (see for example Schwarz et al., 2003, Cell, 115, 199-208). In this instance the sense sequence is believed to direct the RISC complex to a sequence (off-target sequence) that is distinct from the intended target sequence, resulting in the inhibition of the off-target sequence. In these double stranded nucleic acid molecules, each strand is complementary to a distinct target nucleic acid sequence. However, the off-targets that are affected by these dsRNAs are not entirely predictable and are non-specific.

[0378] Distinct from the double stranded nucleic acid molecules known in the art, the applicants have developed a novel, potentially cost effective and simplified method of down regulating or inhibiting the expression of more than one target nucleic acid sequence using a single multifunctional siNA construct. The multifunctional siNA molecules of the invention are designed to be double-stranded or partially double stranded, such that a portion of each strand or region of the multifunctional siNA is complementary to a target nucleic acid sequence of choice. As such, the multifunctional siNA molecules of the invention are not limited to targeting sequences that are complementary to each other, but rather to any two differing target nucleic acid sequences. Multifunctional siNA molecules of the invention are designed such that each strand or region of the multifunctional siNA molecule, that is complementary to a given target nucleic acid sequence, is of suitable length (e.g., from about 16 to about 28 nucleotides in length, preferably from about 18 to about 28 nucleotides in length) for mediating RNA interference against the target nucleic acid sequence. The complementarity between the target nucleic acid sequence and a strand or region of the multifunctional siNA must be sufficient (at least about 8 base pairs) for cleavage of the target nucleic acid sequence by RNA interference. multifunctional siNA of the invention is expected to minimize off-target effects seen with certain siRNA sequences, such as those described in (Schwarz et al., supra).

[0379] It has been reported that dsRNAs of length between 29 base pairs and 36 base pairs (Tuschl et al., International PCT Publication No. WO 02/44321) do not mediate RNAi. One reason these dsRNAs are inactive may be the lack of turnover or dissociation of the strand that interacts with the target RNA sequence, such that the RISC complex is not able to efficiently interact with multiple copies of the target RNA resulting in a significant decrease in the potency and efficiency of the RNAi process. Applicant has surprisingly found that the multifunctional siNAs of the invention can overcome this hurdle and are capable of enhancing the efficiency and potency of RNAi process. As such, in certain embodiments of the invention, multifunctional siNAs of length of about 29 to about 36 base pairs can be designed such that, a portion of each strand of the multifunctional siNA molecule comprises a nucleotide sequence region that is complementary to a target nucleic acid of length sufficient to mediate RNAi efficiently (e.g., about 15 to about 23 base pairs) and a nucleotide sequence region that is not complementary to the target nucleic acid. By having both complementary and non-complementary portions in each strand of the multifunctional siNA, the multifunctional siNA can mediate RNA interference against a target nucleic acid sequence without being prohibitive to turnover or dissociation (e.g., where the length of each strand is too long to mediate RNAi against the respective target nucleic acid sequence). Furthermore, design of multifunctional siNA molecules of the invention with internal overlapping regions allows the multifunctional siNA molecules to be of favorable (decreased) size for mediating RNA interference and of size that is well suited for use as a therapeutic agent (e.g., wherein each strand is independently from about 18 to about 28 nucleotides in length). Non-limiting examples are illustrated in FIGS. 16-28.

[0380] In one embodiment, a multifunctional siNA molecule of the invention comprises a first region and a second region, where the first region of the multifunctional siNA comprises a nucleotide sequence complementary to a nucleic acid sequence of a first target nucleic acid molecule, and the second region of the multifunctional siNA comprises nucleic acid sequence complementary to a nucleic acid sequence of a second target nucleic acid molecule. In one embodiment, a multifunctional siNA molecule of the invention comprises a first region and a second region, where the first region of the multifunctional siNA comprises nucleotide sequence complementary to a nucleic acid sequence of the first region of a target nucleic acid molecule, and the second region of the multifunctional siNA comprises nucleotide sequence complementary to a nucleic acid sequence of a second region of a the target nucleic acid molecule. In another embodiment, the first region and second region of the multifunctional siNA can comprise separate nucleic acid sequences that share some degree of complementarity (e.g., from about 1 to about 10 complementary nucleotides). In certain embodiments, multifunctional siNA constructs comprising separate nucleic acid seqeunces can be readily linked post-synthetically by methods and reagents known in the art and such linked constructs are within the scope of the invention. Alternately, the first region and second region of the multifunctional siNA can comprise a single nucleic acid sequence having some degree of self complementarity, such as in a hairpin or stem-loop structure. Non-limiting examples of such double stranded and hairpin multifunctional short interfering nucleic acids are illustrated in FIGS. 16 and 17 respectively. These multifunctional short interfering nucleic acids (multifunctional siNAs) can optionally include certain overlapping nucleotide sequence where such overlapping nucleotide sequence is present in between the first region and the second region of the multifunctional siNA (see for example FIGS. 18 and 19). In one embodiment, the first target nucleic acid is a first influenza virus gene (e.g., any of HA, NA, NP, M, NS, PA, PB1, or PB2 genes) and the second target is a second influenza virus gene (e.g., any of HA, NA, NP, M, NS, PA, PB1, or PB2 genes). In one embodiment, the first target nucleic acid is an influenza virus gene and the second target is a host gene involved in influenza infection, life-cycle, or replication. In one embodiment, the first target nucleic acid is a first influenza virus gene derived from a first viral subtype (e.g., different combinations of HA, e.g., H1, H2, H3, H4, H5, H6, H7, H8, H9, H10, H11, H12, H13, H14, H15, H16; and NA, e.g., N1, N2, N3, N4, N5, N6, N7, N8 or N9 genes) and the second target is a second influenza virus gene derived from a second viral subtype (e.g., different combinations of HA, e.g., H1, H2, H3, H4, H5, H6, H7, H8, H9, H10, H11, H12, H13, H14, H15, H16; and NA, e.g., N1, N2, N3, N4, N5, N6, N7, N8 or N9 genes).

[0381] In one embodiment, the invention features a multifunctional short interfering nucleic acid (multifunctional siNA) molecule, wherein each strand of the the multifunctional siNA independently comprises a first region of nucleic acid sequence that is complementary to a distinct target nucleic acid sequence and the second region of nucleotide sequence that is not complementary to the target sequence. The target nucleic acid sequence of each strand is in the same target nucleic acid molecule or different target nucleic acid molecules. In one embodiment, the first target nucleic acid is a first influenza virus gene (e.g., any of HA, NA, NP, M, NS, PA, PB1, or PB2 genes) and the second target is a second influenza virus gene (e.g., any of HA, NA, NP, M, NS, PA, PB1, or PB2 genes). In one embodiment, the first target nucleic acid is an influenza virus gene and the second target is a host gene involved in influenza infection, life-cycle, or replication. In one embodiment, the first target nucleic acid is a first influenza virus gene derived from a first viral subtype (e.g., different combinations of HA, e.g., H1, H2, H3, H4, H5, H6, H7, H8, H9, H10, H11, H12, H13, H14, H15, H16; and NA, e.g., N1, N2, N3, N4, N5, N6, N7, N8 or N9 genes) and the second target is a second influenza virus gene derived from a second viral subtype (e.g., different combinations of HA, e.g., H1, H2, H3, H4, H5, H6, H7, H8, H9, H10, H11, H12, H13, H14, H15, H16; and NA, e.g., N1, N2, N3, N4, N5, N6, N7, N8 or N9 genes).

[0382] In another embodiment, the multifunctional siNA comprises two strands, where: (a) the first strand comprises a region having sequence complementarity to a target nucleic acid sequence (complementary region 1) and a region having no sequence complementarity to the target nucleotide sequence (non-complementary region 1); (b) the second strand of the multifunction siNA comprises a region having sequence complementarity to a target nucleic acid sequence that is distinct from the target nucleotide sequence complementary to the first strand nucleotide sequence (complementary region 2), and a region having no sequence complementarity to the target nucleotide sequence of complementary region 2 (non-complementary region 2); (c) the complementary region 1 of the first strand comprises a nucleotide sequence that is complementary to a nucleotide sequence in the non-complementary region 2 of the second strand and the complementary region 2 of the second strand comprises a nucleotide sequence that is complementary to a nucleotide sequence in the non-complementary region 1 of the first strand. The target nucleic acid sequence of complementary region 1 and complementary region 2 is in the same target nucleic acid molecule or different target nucleic acid molecules. In one embodiment, the first target nucleic acid is a first influenza virus gene (e.g., any of HA, NA, NP, M, NS, PA, PB1, or PB2 genes) and the second target is a second influenza virus gene (e.g., any of HA, NA, NP, M, NS, PA, PB1, or PB2 genes). In one embodiment, the first target nucleic acid is an influenza virus gene and the second target is a host gene involved in influenza infection, life-cycle, or replication. In one embodiment, the first target nucleic acid is a first influenza virus gene derived from a first viral subtype (e.g., different combinations of HA, e.g., H1, H2, H3, H4, H5, H6, H7, H8, H9, H10, H11, H12, H13, H14, H15, H16; and NA, e.g., N1, N2, N3, N4, N5, N6, N7, N8 or N9 genes) and the second target is a second influenza virus gene derived from a second viral subtype (e.g., different combinations of HA, e.g., H1, H2, H3, H4, H5, H6, H7, H8, H9, H10, H11, H12, H13, H14, H15, H16; and NA, e.g., N1, N2, N3, N4, N5, N6, N7, N8 or N9 genes).

[0383] In another embodiment, the multifunctional siNA comprises two strands, where: (a) the first strand comprises a region having sequence complementarity to a target nucleic acid sequence derived from a gene (complementary region 1) and a region having no sequence complementarity to the target nucleotide sequence of complementary region 1 (non-complementary region 1); (b) the second strand of the multifunction siNA comprises a region having sequence complementarity to a target nucleic acid sequence derived from a gene that is distinct from the gene of complementary region 1 (complementary region 2), and a region having no sequence complementarity to the target nucleotide sequence of complementary region 2 (non-complementary region 2); (c) the complementary region 1 of the first strand comprises a nucleotide sequence that is complementary to a nucleotide sequence in the non-complementary region 2 of the second strand and the complementary region 2 of the second strand comprises a nucleotide sequence that is complementary to a nucleotide sequence in the non-complementary region 1 of the first strand. In one embodiment, the first target nucleic acid is a first influenza virus gene (e.g., any of HA, NA, NP, M, NS, PA, PB1, or PB2 genes) and the second target is a second influenza virus gene (e.g., any of HA, NA, NP, M, NS, PA, PB1, or PB2 genes). In one embodiment, the first target nucleic acid is an influenza virus gene and the second target is a host gene involved in influenza infection, life-cycle, or replication. In one embodiment, the first target nucleic acid is a first influenza virus gene derived from a first viral subtype (e.g., different combinations of HA, e.g., H1, H2, H3, H4, H5, H6, H7, H8, H9, H10, H11, H12, H13, H14, H15, H16; and NA, e.g., N1, N2, N3, N4, N5, N6, N7, N8 or N9 genes) and the second target is a second influenza virus gene derived from a second viral subtype (e.g., different combinations of HA, e.g., H1, H2, H3, H4, H5, H6, H7, H8, H9, H1O, H11, H12, H13, H14, H15, H16; and NA, e.g., N1, N2, N3, N4, N5, N6, N7, N8 or N9 genes).

[0384] In another embodiment, the multifunctional siNA comprises two strands, where: (a) the first strand comprises a region having sequence complementarity to a target nucleic acid sequence derived from a first gene (complementary region 1) and a region having no sequence complementarity to the target nucleotide sequence of complementary region 1 (non-complementary region 1); (b) the second strand of the multifunction siNA comprises a region having sequence complementarity to a second target nucleic acid sequence distinct from the first target nucleic acid sequence of complementary region 1 (complementary region 2), provided, however, that the target nucleic acid sequence for complementary region 1 and target nucleic acid sequence for complementary region 2 are both derived from the same gene, and a region having no sequence complementarity to the target nucleotide sequence of complementary region 2 (non-complementary region 2); (c) the complementary region 1 of the first strand comprises a nucleotide sequence that is complementary to a nucleotide sequence in the non-complementary region 2 of the second strand and the complementary region 2 of the second strand comprises a nucleotide sequence that is complementary to nucleotide sequence in the non-complementary region 1 of the first strand. In one embodiment, the first target nucleic acid is a first influenza virus gene (e.g., any of HA, NA, NP, M, NS, PA, PB1, or PB2 genes) and the second target is a second influenza virus gene (e.g., any of HA, NA, NP, M, NS, PA, PB1, or PB2 genes). In one embodiment, the first target nucleic acid is an influenza virus gene and the second target is a host gene involved in influenza infection, life-cycle, or replication. In one embodiment, the first target nucleic acid is a first influenza virus gene derived from a first viral subtype (e.g., different combinations of HA, e.g., H1, H2, H3, H4, H5, H6, H7, H8, H9, H10, H11, H12, H13, H14, H15, H16; and NA, e.g., N1, N2, N3, N4, N5, N6, N7, N8 or N9 genes) and the second target is a second influenza virus gene derived from a second viral subtype (e.g., different combinations of HA, e.g., H1, H2, H3, H4, H5, H6, H7, H8, H9, H10, H11, H12, H13, H14, H15, H16; and NA, e.g., N1, N2, N3, N4, N5, N6, N7, N8 or N9 genes).

[0385] In one embodiment, the invention features a multifunctional short interfering nucleic acid (multifunctional siNA) molecule, wherein the multifunctional siNA comprises two complementary nucleic acid sequences in which the first sequence comprises a first region having nucleotide sequence complementary to nucleotide sequence within a first target nucleic acid molecule, and in which the second seqeunce comprises a first region having nucleotide sequence complementary to a distinct nucleotide sequence within the same target nucleic acid molecule. Preferably, the first region of the first sequence is also complementary to the nucleotide sequence of the second region of the second sequence, and where the first region of the second sequence is complementary to the nucleotide sequence of the second region of the first sequence. In one embodiment, the first target nucleic acid is a first influenza virus gene (e.g., any of HA, NA, NP, M, NS, PA, PB1, or PB2 genes) and the second target is a second influenza virus gene (e.g., any of HA, NA, NP, M, NS, PA, PB1, or PB2 genes). In one embodiment, the first target nucleic acid is an influenza virus gene and the second target is a host gene involved in influenza infection, life-cycle, or replication. In one embodiment, the first target nucleic acid is a first influenza virus gene derived from a first viral subtype (e.g., different combinations of HA, e.g., H1, H2, H3, H4, H5, H6, H7, H8, H9, H10, H11, H12, H13, H14, H15, H16; and NA, e.g., N1, N2, N3, N4, N5, N6, N7, N8 or N9 genes) and the second target is a second influenza virus gene derived from a second viral subtype (e.g., different combinations of HA, e.g., H1, H2, H3, H4, H5, H6, H7, H8, H9, H10, H11, H12, H13, H14, H15, H16; and NA, e.g., N1, N2, N3, N4, N5, N6, N7, N8 or N9 genes).

[0386] In one embodiment, the invention features a multifunctional short interfering nucleic acid (multifunctional siNA) molecule, wherein the multifunctional siNA comprises two complementary nucleic acid sequences in which the first sequence comprises a first region having a nucleotide sequence complementary to a nucleotide sequence within a first target nucleic acid molecule, and in which the second seqeunce comprises a first region having a nucleotide sequence complementary to a distinct nucleotide sequence within a second target nucleic acid molecule. Preferably, the first region of the first sequence is also complementary to the nucleotide sequence of the second region of the second sequence, and where the first region of the second sequence is complementary to the nucleotide sequence of the second region of the first sequence. In one embodiment, the first target nucleic acid is a first influenza virus gene (e.g., any of HA, NA, NP, M, NS, PA, PB1, or PB2 genes) and the second target is a second influenza virus gene (e.g., any of HA, NA, NP, M, NS, PA, PB1, or PB2 genes). In one embodiment, the first target nucleic acid is a first influenza virus gene derived from a first viral subtype (e.g., different combinations of HA, e.g., H1, H2, H3, H4, H5, H6, H7, H8, H9, H10, H11, H12, H13, H14, H15, H16; and NA, e.g., N1, N2, N3, N4, N5, N6, N7, N8 or N9 genes) and the second target is a second influenza virus gene derived from a second viral subtype (e.g., different combinations of HA, e.g., H1, H2, H3, H4, H5, H6, H7, H8, H9, H10, H11, H12, H13, H14, H15, H16; and NA, e.g., N1, N2, N3, N4, N5, N6, N7, N8 or N9 genes).

[0387] In one embodiment, the invention features a multifunctional siNA molecule comprising a first region and a second region, where the first region comprises a nucleic acid sequence having about 18 to about 28 nucleotides complementary to a nucleic acid sequence within a first target nucleic acid molecule, and the second region comprises nucleotide sequence having about 18 to about 28 nucleotides complementary to a distinct nucleic acid sequence within a second target nucleic acid molecule.

[0388] In one embodiment, the invention features a multifunctional siNA molecule comprising a first region and a second region, where the first region comprises nucleic acid sequence having about 18 to about 28 nucleotides complementary to a nucleic acid sequence within a target nucleic acid molecule, and the second region comprises nucleotide sequence having about 18 to about 28 nucleotides complementary to a distinct nucleic acid sequence within the same target nucleic acid molecule.

[0389] In one embodiment, the invention features a double stranded multifunctional short interfering nucleic acid (multifunctional siNA) molecule, wherein one strand of the multifunctional siNA comprises a first region having nucleotide sequence complementary to a first target nucleic acid sequence, and the second strand comprises a first region having a nucleotide sequence complementary to a second target nucleic acid sequence. The first and second target nucleic acid sequences can be present in separate target nucleic acid molecules or can be different regions within the same target nucleic acid molecule. As such, multifunctional siNA molecules of the invention can be used to target the expression of different genes, splice variants of the same gene, both mutant and conserved regions of one or more gene transcripts, or both coding and non-coding sequences of the same or differeing genes or gene transcripts.

[0390] In one embodiment, a target nucleic acid molecule of the invention encodes a single protein. In another embodiment, a target nucleic acid molecule encodes more than one protein (e.g., 1, 2, 3, 4, 5 or more proteins). As such, a multifunctional siNA construct of the invention can be used to down regulate or inhibit the expression of several proteins. For example, a multifunctional siNA molecule comprising a region in one strand having nucleotide sequence complementarity to a first target nucleic acid sequence derived from a gene encoding one protein and the second strand comprising a region with nucleotide sequence complementarity to a second target nucleic acid sequence present in target nucleic acid molecules derived from genes encoding two or more proteins (e.g., two or more differing target sequences) can be used to down regulate, inhibit, or shut down a particular biologic pathway.by targeting, for example, two or more targets involved in a biologic pathway.

[0391] In one embodiment the invention takes advantage of conserved nucleotide sequences present in different isoforms of cytokines or ligands and receptors for the cytokines or ligands. By designing multifunctional siNAs in a manner where one strand includes a sequence that is complementary to a target nucleic acid sequence conserved among various isoforms of a cytokine and the other strand includes sequence that is complementary to a target nucleic acid sequence conserved among the receptors for the cytokine, it is possible to selectively and effectively modulate or inhibit a biological pathway or multiple genes in a biological pathway using a single multifunctional siNA.

[0392] In one embodiment, a double stranded multifunctional siNA molecule of the invention comprises a structure having Formula MF-I:

5′-p-X Z X′-3′
3′-Y′ Z Y-p-5′

wherein each 5′-p-XZX′-3′ and 5′-p-YZY′-3′ are independently an oligonucleotide of length of about 20 nucleotides to about 300 nucleotides, preferably of about 20 to about 200 nucleotides, about 20 to about 100 nucleotides, about 20 to about 40 nucleotides, about 20 to about 40 nucleotides, about 24 to about 38 nucleotides, or about 26 to about 38 nucleotides; XZ comprises a nucleic acid sequence that is complementary to a first target nucleic acid sequence; YZ is an oligonucleotide comprising nucleic acid sequence that is complementary to a second target nucleic acid sequence; Z comprises nucleotide sequence of length about 1 to about 24 nucleotides (e.g., about 1, 2, 3, 4, 5, 6, 7, 8, 9, 10, 11, 12, 13, 14, 15, 16, 17, 18, 19, 20, 21, 22, 23, or 24 nucleotides) that is self complimentary; X comprises nucleotide sequence of length about 1 to about 100 nucleotides, preferably about 1 to about 21 nucleotides (e.g., about 1, 2, 3, 4, 5, 6, 7, 8, 9, 10, 11, 12, 13, 14, 15, 16, 17, 18, 19, 20, or 21 nucleotides) that is complementary to nucleotide sequence present in region Y′; Y comprises nucleotide sequence of length about 1 to about 100 nucleotides, prefereably about 1- about 21 nucleotides (e.g., about 1, 2, 3, 4, 5, 6, 7, 8, 9, 10, 11, 12, 13, 14, 15, 16, 17, 18, 19, 20 or 21 nucleotides) that is complementary to nucleotide sequence present in region X′; each p comprises a terminal phosphate group that is independently present or absent; each XZ and YZ is independently of length sufficient to stably interact (i.e., base pair) with the first and second target nucleic acid sequence, respectively, or a portion thereof. For example, each sequence X and Y can independently comprise sequence from about 12 to about 21 or more nucleotides in length (e.g., about 12, 13, 14, 15, 16, 17, 18, 19, 20, 21, or more) that is complementary to a target nucleotide sequence in different target nucleic acid molecules, such as target RNAs or a portion thereof. In another non-limiting example, the length of the nucleotide sequence of X and Z together that is complementary to the first target nucleic acid sequence or a portion thereof is from about 12 to about 21 or more nucleotides (e.g., about 12, 13, 14, 15, 16, 17, 18, 19, 20, 21, or more). In another non-limiting example, the length of the nucleotide sequence of Y and Z together, that is complementary to the second target nucleic acid sequence or a portion thereof is from about 12 to about 21 or more nucleotides (e.g., about 12, 13, 14, 15, 16, 17, 18, 19, 20, 21, or more). In one embodiment, the first target nucleic acid sequence and the second target nucleic acid sequence are present in the same target nucleic acid molecule (e.g., target RNA). In another embodiment, the first target nucleic acid sequence and the second target nucleic acid sequence are present in different target nucleic acid molecules. In one embodiment, Z comprises a palindrome or a repeat sequence. In one embodiment, the lengths of oligonucleotides X and X′ are identical. In another embodiment, the lengths of oligonucleotides X and X′ are not identical. In one embodiment, the lengths of oligonucleotides Y and Y′ are identical. In another embodiment, the lengths of oligonucleotides Y and Y′ are not identical. In one embodiment, the double stranded oligonucleotide construct of Formula I(a) includes one or more, specifically 1, 2, 3 or 4, mismatches, to the extent such mismatches do not significantly diminish the ability of the double stranded oligonucleotide to inhibit target gene expression.

[0393] In one embodiment, a multifunctional siNA molecule of the invention comprises a structure having Formula MF-II:

5′-p-X X′-3′
3′-Y′ Y-p-5′

wherein each 5′-p-XX′-3′ and 5′-p-YY′-3′ are independently an oligonucleotide of length of about 20 nucleotides to about 300 nucleotides, preferably about 20 to about 200 nucleotides, about 20 to about 100 nucleotides, about 20 to about 40 nucleotides, about 20 to about 40 nucleotides, about 24 to about 38 nucleotides, or about 26 to about 38 nucleotides; X comprises a nucleic acid sequence that is complementary to a first target nucleic acid sequence; Y is an oligonucleotide comprising nucleic acid sequence that is complementary to a second target nucleic acid sequence; X comprises a nucleotide sequence of length about 1 to about 100 nucleotides, preferably about 1 to about 21 nucleotides (e.g., about 1, 2, 3, 4, 5, 6, 7, 8, 9, 10, 11, 12, 13, 14, 15, 16, 17, 18, 19, 20, or 21 nucleotides) that is complementary to nucleotide sequence present in region Y′; Y comprises nucleotide sequence of length about 1 to about 100 nucleotides, prefereably about 1 to about 21 nucleotides (e.g., about 1, 2, 3, 4, 5, 6, 7, 8, 9, 10, 11, 12, 13, 14, 15, 16, 17, 18, 19, 20 or 21 nucleotides) that is complementary to nucleotide sequence present in region X′; each p comprises a terminal phosphate group that is independently present or absent; each X and Y independently is of length sufficient to stably interact (i.e., base pair) with the first and second target nucleic acid sequence, respectively, or a portion thereof. For example, each sequence X and Y can independently comprise sequence from about 12 to about 21 or more nucleotides in length (e.g., about 12, 13, 14, 15, 16, 17, 18, 19, 20, 21, or more) that is complementary to a target nucleotide sequence in different target nucleic acid molecules or a portion thereof. In one embodiment, the first target nucleic acid sequence and the second target nucleic acid sequence are present in the same target nucleic acid molecule (e.g., target RNA or DNA). In another embodiment, the first target nucleic acid sequence and the second target nucleic acid sequence are present in different target nucleic acid molecules or a portion thereof. In one embodiment, Z comprises a palindrome or a repeat sequence. In one embodiment, the lengths of oligonucleotides X and X′ are identical. In another embodiment, the lengths of oligonucleotides X and X′ are not identical. In one embodiment, the lengths of oligonucleotides Y and Y′ are identical. In another embodiment, the lengths of oligonucleotides Y and Y′ are not identical. In one embodiment, the double stranded oligonucleotide construct of Formula I(a) includes one or more, specifically 1, 2, 3 or 4, mismatches, to the extent such mismatches do not significantly diminish the ability of the double stranded oligonucleotide to inhibit target gene expression.

[0394] In one embodiment, a multifunctional siNA molecule of the invention comprises a structure having Formula MF-III:

X X′
Y′-W-Y

wherein each X, X′, Y, and Y′ is independently an oligonucleotide of length of about 15 nucleotides to about 50 nucleotides, preferably about 18 to about 40 nucleotides, or about 19 to about 23 nucleotides; X comprises nucleotide sequence that is complementary to nucleotide sequence present in region Y′; X′ comprises nucleotide sequence that is complementary to nucleotide sequence present in region Y; each X and X′ is independently of length sufficient to stably interact (i.e., base pair) with a first and a second target nucleic acid sequence, respectively, or a portion thereof; W represents a nucleotide or non-nucleotide linker that connects sequences Y′ and Y; and the multifunctional siNA directs cleavage of the first and second target sequence via RNA interference. In one embodiment, the first target nucleic acid sequence and the second target nucleic acid sequence are present in the same target nucleic acid molecule (e.g., target RNA). In another embodiment, the first target nucleic acid sequence and the second target nucleic acid sequence are present in different target nucleic acid molecules or a portion thereof. In one embodiment, region W connects the 3′-end of sequence Y′ with the 3′-end of sequence Y. In one embodiment, region W connects the 3′-end of sequence Y′ with the 5′-end of sequence Y. In one embodiment, region W connects the 5′-end of sequence Y′ with the 5′-end of sequence Y. In one embodiment, region W connects the 5 ′-end of sequence Y′ with the 3 ′-end of sequence Y. In one embodiment, a terminal phosphate group is present at the 5′-end of sequence X. In one embodiment, a terminal phosphate group is present at the 5′-end of sequence X′. In one embodiment, a terminal phosphate group is present at the 5′-end of sequence Y. In one embodiment, a terminal phosphate group is present at the 5′-end of sequence Y′. In one embodiment, W connects sequences Y and Y′ via a biodegradable linker. In one embodiment, W further comprises a conjugate, label, aptamer, ligand, lipid, or polymer.

[0395] In one embodiment, a multifunctional siNA molecule of the invention comprises a structure having Formula MF-IV:

X X′
Y′-W-Y

wherein each X, X′, Y, and Y′ is independently an oligonucleotide of length of about 15 nucleotides to about 50 nucleotides, preferably about 18 to about 40 nucleotides, or about 19 to about 23 nucleotides; X comprises nucleotide sequence that is complementary to nucleotide sequence present in region Y′; X′ comprises nucleotide sequence that is complementary to nucleotide sequence present in region Y; each Y and Y′ is independently of length sufficient to stably interact (i.e., base pair) with a first and a second target nucleic acid sequence, respectively, or a portion thereof, W represents a nucleotide or non-nucleotide linker that connects sequences Y′ and Y; and the multifunctional siNA directs cleavage of the first and second target sequence via RNA interference. In one embodiment, the first target nucleic acid sequence and the second target nucleic acid sequence are present in the same target nucleic acid molecule (e.g., target RNA). In another embodiment, the first target nucleic acid sequence and the second target nucleic acid sequence are present in different target nucleic acid molecules or a portion thereof. In one embodiment, region W connects the 3′-end of sequence Y′ with the 3′-end of sequence Y. In one embodiment, region W connects the 3′-end of sequence Y′ with the 5′-end of sequence Y. In one embodiment, region W connects the 5′-end of sequence Y′ with the 5′-end of sequence Y. In one embodiment, region W connects the 5′-end of sequence Y′ with the 3′-end of sequence Y. In one embodiment, a terminal phosphate group is present at the 5′-end of sequence X. In one embodiment, a terminal phosphate group is present at the 5′-end of sequence X′. In one embodiment, a terminal phosphate group is present at the 5′-end of sequence Y. In one embodiment, a terminal phosphate group is present at the 5′-end of sequence Y′. In one embodiment, W connects sequences Y and Y′ via a biodegradable linker. In one embodiment, W further comprises a conjugate, label, aptamer, ligand, lipid, or polymer.

[0396] In one embodiment, a multifunctional siNA molecule of the invention comprises a structure having Formula MF-V:

X X′
Y′-W-Y

wherein each X, X′, Y, and Y′ is independently an oligonucleotide of length of about 15 nucleotides to about 50 nucleotides, preferably about 18 to about 40 nucleotides, or about 19 to about 23 nucleotides; X comprises nucleotide sequence that is complementary to nucleotide sequence present in region Y′; X′ comprises nucleotide sequence that is complementary to nucleotide sequence present in region Y; each X, X′, Y, or Y′ is independently of length sufficient to stably interact (i.e., base pair) with a first, second, third, or fourth target nucleic acid sequence, respectively, or a portion thereof; W represents a nucleotide or non-nucleotide linker that connects sequences Y′ and Y; and the multifunctional siNA directs cleavage of the first, second, third, and/or fourth target sequence via RNA interference. In one embodiment, the first, second, third and fourth target nucleic acid sequence are all present in the same target nucleic acid molecule (e.g., target RNA). In another embodiment, the first, second, third and fourth target nucleic acid sequence are independently present in different target nucleic acid molecules or a portion thereof. In one embodiment, region W connects the 3′-end of sequence Y′ with the 3′-end of sequence Y. In one embodiment, region W connects the 3′-end of sequence Y′ with the 5′-end of sequence Y. In one embodiment, region W connects the 5′-end of sequence Y′ with the 5′-end of sequence Y. In one embodiment, region W connects the 5′-end of sequence Y′ with the 3′-end of sequence Y. In one embodiment, a terminal phosphate group is present at the 5′-end of sequence X. In one embodiment, a terminal phosphate group is present at the 5′-end of sequence X′. In one embodiment, a terminal phosphate group is present at the 5′-end of sequence Y. In one embodiment, a terminal phosphate group is present at the 5′-end of sequence Y′. In one embodiment, W connects sequences Y and Y′ via a biodegradable linker. In one embodiment, W further comprises a conjugate, label, aptamer, ligand, lipid, or polymer.

[0397] In any of the preceeding embodiments, embodiment, the first target nucleic acid is a first influenza virus gene (e.g., any of HA, NA, NP, M, NS, PA, PB1, or PB2 genes) and the second target is a second influenza virus gene (e.g., any of HA, NA, NP, M, NS, PA, PB1, or PB2 genes). In one embodiment, the first target nucleic acid is an influenza virus gene and the second target is a host gene involved in influenza infection, life-cycle, or replication. In one embodiment, the first target nucleic acid is a first influenza virus gene derived from a first viral subtype (e.g., different combinations of HA, e.g., H1, H2, H3, H4, H5, H6, H7, H8, H9, H10, H11, H12, H13, H14, H15, H16; and NA, e.g., N1, N2, N3, N4, N5, N6, N7, N8 or N9 genes) and the second target is a second influenza virus gene derived from a second viral subtype (e.g., different combinations of HA, e.g., H1, H2, H3, H4, H5, H6, H7, H8, H9, H10, H11, H12, H13, H14, H15, H16; and NA, e.g., N1, N2, N3, N4, N5, N6, N7, N8 or N9 genes).

[0398] In one embodiment, regions X and Y of multifunctional siNA molecule of the invention (e.g., having any of Formula MF-I-MF-V), are complementary to different target nucleic acid sequences that are portions of the same target nucleic acid molecule. In one embodiment, such target nucleic acid sequences are at different locations within the coding region of a RNA transcript. In one embodiment, such target nucleic acid sequences comprise coding and non-coding regions of the same RNA transcript. In one embodiment, such target nucleic acid sequences comprise regions of alternately spliced transcripts or precursors of such alternately spliced transcripts.

[0399] In one embodiment, a multifunctional siNA molecule having any of Formula MF-I-MF-V can comprise chemical modifications as described herein without limitation, such as, for example, nucleotides having any of Formulae I-VII described herein, stabilization chemistries as described in Table IV, or any other combination of modified nucleotides and non-nucleotides as described in the various embodiments herein.

[0400] In one embodiment, the palidrome or repeat sequence or modified nucleotide (e.g., nucleotide with a modified base, such as 2-amino purine or a universal base) in Z of multifunctional siNA constructs having Formula MF-I or MF-II comprises chemically modified nucleotides that are able to interact with a portion of the target nucleic acid sequence (e.g., modified base analogs that can form Watson Crick base pairs or non-Watson Crick base pairs).

[0401] In one embodiment, a multifunctional siNA molecule of the invention, for example each strand of a multifunctional siNA having MF-I-MF-V, independently comprises about 15 to about 40 nucleotides (e.g., about 15, 16, 17, 18, 19, 20, 21, 22, 23, 24, 25, 26, 27, 28, 29, 30, 31, 32, 33, 34, 35, 36, 37, 38, 39, or 40 nucleotides). In one embodiment, a multifunctional siNA molecule of the invention comprises one or more chemical modifications. In a non-limiting example, the introduction of chemically modified nucleotides and/or non-nucleotides into nucleic acid molecules of the invention provides a powerful tool in overcoming potential limitations of in vivo stability and bioavailability inherent to unmodified RNA molecules that are delivered exogenously. For example, the use of chemically modified nucleic acid molecules can enable a lower dose of a particular nucleic acid molecule for a given therapeutic effect since chemically modified nucleic acid molecules tend to have a longer half-life in serum or in cells or tissues. Furthermore, certain chemical modifications can improve the bioavailability and/or potency of nucleic acid molecules by not only enhancing half-life but also facilitating the targeting of nucleic acid molecules to particular organs, cells or tissues and/or improving cellular uptake of the nucleic acid molecules. Therefore, even if the activity of a chemically modified nucleic acid molecule is reduced in vitro as compared to a native/unmodified nucleic acid molecule, for example when compared to an unmodified RNA molecule, the overall activity of the modified nucleic acid molecule can be greater than the native or unmodified nucleic acid molecule due to improved stability, potency, duration of effect, bioavailability and/or delivery of the molecule.

[0402] In another embodiment, the invention features multifunctional siNAs, wherein the multifunctional siNAs are assembled from two separate double-stranded siNAs, with one of the ends of each sense strand is tethered to the end of the sense strand of the other siNA molecule, such that the two antisense siNA strands are annealed to their corresponding sense strand that are tethered to each other at one end (see FIG. 22). The tethers or linkers can be nucleotide-based linkers or non-nucleotide based linkers as generally known in the art and as described herein.

[0403] In one embodiment, the invention features a multifunctional siNA, wherein the multifunctional siNA is assembled from two separate double-stranded siNAs, with the 5′-end of one sense strand of the siNA is tethered to the 5′-end of the sense strand of the other siNA molecule, such that the 5′-ends of the two antisense siNA strands, annealed to their corresponding sense strand that are tethered to each other at one end, point away (in the opposite direction) from each other (see FIG. 22 (A)). The tethers or linkers can be nucleotide-based linkers or non-nucleotide based linkers as generally known in the art and as described herein.

[0404] In one embodiment, the invention features a multifunctional siNA, wherein the multifunctional siNA is assembled from two separate double-stranded siNAs, with the 3′-end of one sense strand of the siNA is tethered to the 3′-end of the sense strand of the other siNA molecule, such that the 5′-ends of the two antisense siNA strands, annealed to their corresponding sense strand that are tethered to each other at one end, face each other (see FIG. 22 (B)). The tethers or linkers can be nucleotide-based linkers or non-nucleotide based linkers as generally known in the art and as described herein.

[0405] In one embodiment, the invention features a multifunctional siNA, wherein the multifunctional siNA is assembled from two separate double-stranded siNAs, with the 5′-end of one sense strand of the siNA is tethered to the 3′-end of the sense strand of the other siNA molecule, such that the 5′-end of the one of the antisense siNA strands annealed to their corresponding sense strand that are tethered to each other at one end, faces the 3′-end of the other antisense strand (see FIG. 22 (C-D)). The tethers or linkers can be nucleotide-based linkers or non-nucleotide based linkers as generally known in the art and as described herein.

[0406] In one embodiment, the invention features a multifunctional siNA, wherein the multifunctional siNA is assembled from two separate double-stranded siNAs, with the 5′-end of one antisense strand of the siNA is tethered to the 3′-end of the antisense strand of the other siNA molecule, such that the 5′-end of the one of the sense siNA strands annealed to their corresponding antisense sense strand that are tethered to each other at one end, faces the 3′-end of the other sense strand (see FIG. 22 (G-H)). In one embodiment, the linkage between the 5′-end of the first antisense strand and the 3′-end of the second antisense strand is designed in such a way as to be readily cleavable (e.g., biodegradable linker) such that the 5′end of each antisense strand of the multifunctional siNA has a free 5′-end suitable to mediate RNA interefence-based cleavage of the target RNA. The tethers or linkers can be nucleotide-based linkers or non-nucleotide based linkers as generally known in the art and as described herein.

[0407] In one embodiment, the invention features a multifunctional siNA, wherein the multifunctional siNA is assembled from two separate double-stranded siNAs, with the 5′-end of one antisense strand of the siNA is tethered to the 5′-end of the antisense strand of the other siNA molecule, such that the 3′-end of the one of the sense siNA strands annealed to their corresponding antisense sense strand that are tethered to each other at one end, faces the 3′-end of the other sense strand (see FIG. 22 (E)). In one embodiment, the linkage between the 5′-end of the first antisense strand and the 5′-end of the second antisense strand is designed in such a way as to be readily cleavable (e.g., biodegradable linker) such that the 5′end of each antisense strand of the multifunctional siNA has a free 5′-end suitable to mediate RNA interefence-based cleavage of the target RNA. The tethers or linkers can be nucleotide-based linkers or non-nucleotide based linkers as generally known in the art and as described herein.

[0408] In one embodiment, the invention features a multifunctional siNA, wherein the multifunctional siNA is assembled from two separate double-stranded siNAs, with the 3′-end of one antisense strand of the siNA is tethered to the 3′-end of the antisense strand of the other siNA molecule, such that the 5′-end of the one of the sense siNA strands annealed to their corresponding antisense sense strand that are tethered to each other at one end, faces the 3′-end of the other sense strand (see FIG. 22 (F)). In one embodiment, the linkage between the 5′-end of the first antisense strand and the 5′-end of the second antisense strand is designed in such a way as to be readily cleavable (e.g., biodegradable linker) such that the 5′end of each antisense strand of the multifunctional siNA has a free 5′-end suitable to mediate RNA interefence-based cleavage of the target RNA. The tethers or linkers can be nucleotide-based linkers or non-nucleotide based linkers as generally known in the art and as described herein.

[0409] In any of the above embodiments, a first target nucleic acid sequence or second target nucleic acid sequence can independently comprise target RNA, DNA or a portion thereof. In one embodiment, the first target nucleic acid sequence is a target RNA, DNA or a portion thereof and the second target nucleic acid sequence is a target RNA, DNA of a portion thereof. In one embodiment, the first target nucleic acid sequence is a target RNA, DNA or a portion thereof and the second target nucleic acid sequence is a another RNA, DNA of a portion thereof.

Synthesis of Nucleic Acid Molecules

[0410] Synthesis of nucleic acids greater than 100 nucleotides in length is difficult using automated methods, and the therapeutic cost of such molecules is prohibitive. In this invention, small nucleic acid motifs (“small” refers to nucleic acid motifs no more than 100 nucleotides in length, preferably no more than 80 nucleotides in length, and most preferably no more than 50 nucleotides in length; e.g., individual siNA oligonucleotide sequences or siNA sequences synthesized in tandem) are preferably used for exogenous delivery. The simple structure of these molecules increases the ability of the nucleic acid to invade targeted regions of protein and/or RNA structure. Exemplary molecules of the instant invention are chemically synthesized, and others can similarly be synthesized.

[0411] Oligonucleotides (e.g., certain modified oligonucleotides or portions of oligonucleotides lacking ribonucleotides) are synthesized using protocols known in the art, for example as described in Caruthers et aL, 1992, Methods in Enzymology 211, 3-19, Thompson et al., International PCT Publication No. WO 99/54459, Wincott et al., 1995, Nucleic Acids Res. 23, 2677-2684, Wincott et al., 1997, Methods Mol. Bio., 74, 59, Brennan et al., 1998, Biotechnol Bioeng., 61, 33-45, and Brennan, U.S. Pat. No. 6,001,311. All of these references are incorporated herein by reference. The synthesis of oligonucleotides makes use of common nucleic acid protecting and coupling groups, such as dimethoxytrityl at the 5′-end, and phosphoramidites at the 3′-end. In a non-limiting example, small scale syntheses are conducted on a 394 Applied Biosystems, Inc. synthesizer using a 0.2 μmol scale protocol with a 2.5 min coupling step for 2′-O-methylated nucleotides and a 45 second coupling step for 2′-deoxy nucleotides or 2′-deoxy-2′-fluoro nucleotides. Table V outlines the amounts and the contact times of the reagents used in the synthesis cycle. Alternatively, syntheses at the 0.2 μmol scale can be performed on a 96-well plate synthesizer, such as the instrument produced by Protogene (Palo Alto, Calif.) with minimal modification to the cycle. A 33-fold excess (60 μL of 0.11 M=6.6 μmol) of 2′-O-methyl phosphoramidite and a 105-fold excess of S-ethyl tetrazole (60 μL of 0.25 M=15 μmol) can be used in each coupling cycle of 2′-O-methyl residues relative to polymer-bound 5′-hydroxyl. A 22-fold excess (40 μL of 0.11 M=4.4 μmol) of deoxy phosphoramidite and a 70-fold excess of S-ethyl tetrazole (40 μL of 0.25 M=10 μmol) can be used in each coupling cycle of deoxy residues relative to polymer-bound 5′-hydroxyl. Average coupling yields on the 394 Applied Biosystems, Inc. synthesizer, determined by colorimetric quantitation of the trityl fractions, are typically 97.5-99%. Other oligonucleotide synthesis reagents for the 394 Applied Biosystems, Inc. synthesizer include the following: detritylation solution is 3% TCA in methylene chloride (ABI); capping is performed with 16% N-methyl imidazole in THF (ABI) and 10% acetic anhydride/10% 2,6-lutidine in THF (ABI); and oxidation solution is 16.9 mM I₂, 49 mM pyridine, 9% water in THF (PerSeptive Biosystems, Inc.). Burdick & Jackson Synthesis Grade acetonitrile is used directly from the reagent bottle. S-Ethyltetrazole solution (0.25 M in acetonitrile) is made up from the solid obtained from American International Chemical, Inc. Alternately, for the introduction of phosphorothioate linkages, Beaucage reagent (3H-1,2-Benzodithiol-3-one 1,1-dioxide, 0.05 M in acetonitrile) is used.

[0412] Deprotection of the DNA-based oligonucleotides is performed as follows: the polymer-bound trityl-on oligoribonucleotide is transferred to a 4 mL glass screw top vial and suspended in a solution of 40% aqueous methylamine (1 mL) at 65° C. for 10 minutes. After cooling to −20° C., the supernatant is removed from the polymer support. The support is washed three times with 1.0 mL of EtOH:MeCN:H2O/3:1:1, vortexed and the supernatant is then added to the first supernatant. The combined supernatants, containing the oligoribonucleotide, are dried to a white powder.

[0413] The method of synthesis used for RNA including certain siNA molecules of the invention follows the procedure as described in Usman et al., 1987, J Am. Chem. Soc., 109, 7845; Scaringe et al., 1990, Nucleic Acids Res., 18, 5433; and Wincott et al., 1995, Nucleic Acids Res. 23, 2677-2684 Wincott et al., 1997, Methods Mol. Bio., 74, 59, and makes use of common nucleic acid protecting and coupling groups, such as dimethoxytrityl at the 5′-end, and phosphoramidites at the 3′-end. In a non-limiting example, small scale syntheses are conducted on a 394 Applied Biosystems, Inc. synthesizer using a 0.2 μmol scale protocol with a 7.5 min coupling step for alkylsilyl protected nucleotides and a 2.5 min coupling step for 2′-O-methylated nucleotides. Table V outlines the amounts and the contact times of the reagents used in the synthesis cycle. Alternatively, syntheses at the 0.2 μmol scale can be done on a 96-well plate synthesizer, such as the instrument produced by Protogene (Palo Alto, Calif.) with minimal modification to the cycle. A 33-fold excess (60 μL of 0.11 M=6.6 μmol) of 2′-O-methyl phosphoramidite and a 75-fold excess of S-ethyl tetrazole (60 μL of 0.25 M=15 μmol) can be used in each coupling cycle of 2′-O-methyl residues relative to polymer-bound 5′-hydroxyl. A 66-fold excess (120 μL of 0.11 M=13.2 μmol) of alkylsilyl (ribo) protected phosphoramidite and a 150-fold excess of S-ethyl tetrazole (120 μL of 0.25 M=30 μmol) can be used in each coupling cycle of ribo residues relative to polymer-bound 5′-hydroxyl. Average coupling yields on the 394 Applied Biosystems, Inc. synthesizer, determined by colorimetric quantitation of the trityl fractions, are typically 97.5-99%. Other oligonucleotide synthesis reagents for the 394 Applied Biosystems, Inc. synthesizer include the following: detritylation solution is 3% TCA in methylene chloride (ABI); capping is performed with 16% N-methyl imidazole in THF (ABI) and 10% acetic anhydride/10% 2,6-lutidine in THF (ABI); oxidation solution is 16.9 mM I₂, 49 mM pyridine, 9% water in THF (PerSeptive Biosystems, Inc.). Burdick & Jackson Synthesis Grade acetonitrile is used directly from the reagent bottle. S-Ethyltetrazole solution (0.25 M in acetonitrile) is made up from the solid obtained from American International Chemical, Inc. Alternately, for the introduction of phosphorothioate linkages, Beaucage reagent (3H-1,2-Benzodithiol-3-one 1,1-dioxide0.05 M in acetonitrile) is used.

[0414] Deprotection of the RNA is performed using either a two-pot or one-pot protocol. For the two-pot protocol, the polymer-bound trityl-on oligoribonucleotide is transferred to a 4 mL glass screw top vial and suspended in a solution of 40% aq. methylamine (1 mL) at 65° C. for 10 min. After cooling to −20° C., the supernatant is removed from the polymer support. The support is washed three times with 1.0 mL of EtOH:MeCN:H2O/3:1:1, vortexed and the supernatant is then added to the first supernatant. The combined supernatants, containing the oligoribonucleotide, are dried to a white powder. The base deprotected oligoribonucleotide is resuspended in anhydrous TEA/HF/NMP solution (300 μL of a solution of 1.5 mL N-methylpyrrolidinone, 750 μL TEA and 1 mL TEA·3HF to provide a 1.4 M HF concentration) and heated to 65° C. After 1.5 h, the oligomer is quenched with 1.5 M NH₄HCO₃.

[0415] Alternatively, for the one-pot protocol, the polymer-bound trityl-on oligoribonucleotide is transferred to a 4 mL glass screw top vial and suspended in a solution of 33% ethanolic methylamine/DMSO: 1/1 (0.8 mL) at 65° C. for 15 minutes. The vial is brought to room temperature TEA·3HF (0.1 mL) is added and the vial is heated at 65° C. for 15 minutes. The sample is cooled at −20° C. and then quenched with 1.5 M NH₄HCO₃.

[0416] For purification of the trityl-on oligomers, the quenched NH₄HCO₃ solution is loaded onto a C-18 containing cartridge that had been prewashed with acetonitrile followed by 50 mM TEAA. After washing the loaded cartridge with water, the RNA is detritylated with 0.5% TFA for 13 minutes. The cartridge is then washed again with water, salt exchanged with 1 M NaCl and washed with water again. The oligonucleotide is then eluted with 30% acetonitrile.

[0417] The average stepwise coupling yields are typically >98% (Wincott et al., 1995 Nucleic Acids Res. 23, 2677-2684). Those of ordinary skill in the art will recognize that the scale of synthesis can be adapted to be larger or smaller than the example described above including but not limited to 96-well format.

[0418] Alternatively, the nucleic acid molecules of the present invention can be synthesized separately and joined together post-synthetically, for example, by ligation (Moore et al., 1992, Science 256, 9923; Draper et al., International PCT publication No. WO 93/23569; Shabarova et al., 1991, Nucleic Acids Research 19, 4247; Bellon et al., 1997, Nucleosides & Nucleotides, 16, 951; Bellon et al., 1997, Bioconjugate Chem. 8, 204), or by hybridization following synthesis and/or deprotection.

[0419] The siNA molecules of the invention can also be synthesized via a tandem synthesis methodology as described in Example 1 herein, wherein both siNA strands are synthesized as a single contiguous oligonucleotide fragment or strand separated by a cleavable linker which is subsequently cleaved to provide separate siNA fragments or strands that hybridize and permit purification of the siNA duplex. The linker can be a polynucleotide linker or a non-nucleotide linker. The tandem synthesis of siNA as described herein can be readily adapted to both multiwell/multiplate synthesis platforms such as 96 well or similarly larger multi-well platforms. The tandem synthesis of siNA as described herein can also be readily adapted to large scale synthesis platforms employing batch reactors, synthesis columns and the like.

[0420] A siNA molecule can also be assembled from two distinct nucleic acid strands or fragments wherein one fragment includes the sense region and the second fragment includes the antisense region of the RNA molecule.

[0421] The nucleic acid molecules of the present invention can be modified extensively to enhance stability by modification with nuclease resistant groups, for example, 2′-amino, 2′-C-allyl, 2′-fluoro, 2′-O-methyl, 2′-H (for a review see Usman and Cedergren, 1992, TIBS 17, 34; Usman et al., 1994, Nucleic Acids Symp. Ser. 31, 163). siNA constructs can be purified by gel electrophoresis using general methods or can be purified by high pressure liquid chromatography (HPLC; see Wincott et al., supra, the totality of which is hereby incorporated herein by reference) and re-suspended in water.

[0422] In another aspect of the invention, siNA molecules of the invention are expressed from transcription units inserted into DNA or RNA vectors. The recombinant vectors can be DNA plasmids or viral vectors. siNA expressing viral vectors can be constructed based on, but not limited to, adeno-associated virus, retrovirus, adenovirus, or alphavirus. The recombinant vectors capable of expressing the siNA molecules can be delivered as described herein, and persist in target cells. Alternatively, viral vectors can be used that provide for transient expression of siNA molecules.

Optimizing Activity of the Nucleic Acid Molecule of the Invention.

[0423] Chemically synthesizing nucleic acid molecules with modifications (base, sugar and/or phosphate) can prevent their degradation by serum ribonucleases, which can increase their potency (see e.g., Eckstein et al., International Publication No. WO 92/07065; Perrault et al., 1990 Nature 344, 565; Pieken et al., 1991, Science 253, 314; Usman and Cedergren, 1992, Trends in Biochem. Sci. 17, 334; Usman et al., International Publication No. WO 93/15187; and Rossi et al., International Publication No. WO 91/03162; Sproat, U.S. Pat. No. 5,334,711; Gold et al., U.S. Pat. No. 6,300,074; and Burgin et al., supra; all of which are incorporated by reference herein). All of the above references describe various chemical modifications that can be made to the base, phosphate and/or sugar moieties of the nucleic acid molecules described herein. Modifications that enhance their efficacy in cells, and removal of bases from nucleic acid molecules to shorten oligonucleotide synthesis times and reduce chemical requirements are desired.

[0424] There are several examples in the art describing sugar, base and phosphate modifications that can be introduced into nucleic acid molecules with significant enhancement in their nuclease stability and efficacy. For example, oligonucleotides are modified to enhance stability and/or enhance biological activity by modification with nuclease resistant groups, for example, 2′-amino, 2′-C-allyl, 2′-fluoro, 2′-O-methyl, 2′-O-allyl, 2′-H, nucleotide base modifications (for a review see Usman and Cedergren, 1992, TIBS. 17, 34; Usman et al., 1994, Nucleic Acids Symp. Ser. 31, 163; Burgin et al., 1996, Biochemistry, 35, 14090). Sugar modification of nucleic acid molecules have been extensively described in the art (see Eckstein et al., International Publication PCT No. WO 92/07065; Perrault et al. Nature, 1990, 344, 565-568; Pieken et al. Science, 1991, 253, 314-317; Usman and Cedergren, Trends in Biochem. Sci., 1992, 17, 334-339; Usman et al. International Publication PCT No. WO 93/15187; Sproat, U.S. Pat. No. 5,334,711 and Beigelman et al., 1995, J Biol. Chem., 270, 25702; Beigelman et al., International PCT publication No. WO 97/26270; Beigelman et al., U.S. Pat. No. 5,716,824; Usman et al., U.S. Pat. No. 5,627,053; Woolf et al., International PCT Publication No. WO 98/13526; Thompson et al., USSN 60/082,404 which was filed on Apr. 20, 1998; Karpeisky et al., 1998, Tetrahedron Lett., 39, 1131; Earnshaw and Gait, 1998, Biopolymers (Nucleic Acid Sciences), 48, 39-55; Verma and Eckstein, 1998, Annu. Rev. Biochem., 67, 99-134; and Burlina et al., 1997, Bioorg. Med. Chem., 5, 1999-2010; all of the references are hereby incorporated in their totality by reference herein). Such publications describe general methods and strategies to determine the location of incorporation of sugar, base and/or phosphate modifications and the like into nucleic acid molecules without modulating catalysis, and are incorporated by reference herein. In view of such teachings, similar modifications can be used as described herein to modify the siNA nucleic acid molecules of the instant invention so long as the ability of siNA to promote RNAi is cells is not significantly inhibited.

[0425] While chemical modification of oligonucleotide internucleotide linkages with phosphorothioate, phosphorodithioate, and/or 5′-methylphosphonate linkages improves stability, excessive modifications can cause some toxicity or decreased activity. Therefore, when designing nucleic acid molecules, the amount of these internucleotide linkages should be minimized. The reduction in the concentration of these linkages should lower toxicity, resulting in increased efficacy and higher specificity of these molecules.

[0426] Short interfering nucleic acid (siNA) molecules having chemical modifications that maintain or enhance activity are provided. Such a nucleic acid is also generally more resistant to nucleases than an unmodified nucleic acid. Accordingly, the in vitro and/or in vivo activity should not be significantly lowered. In cases in which modulation is the goal, therapeutic nucleic acid molecules delivered exogenously should optimally be stable within cells until translation of the target RNA has been modulated long enough to reduce the levels of the undesirable protein. This period of time varies between hours to days depending upon the disease state. Improvements in the chemical synthesis of RNA and DNA (Wincott et al., 1995, Nucleic Acids Res. 23, 2677; Caruthers et al., 1992, Methods in Enzymology 211, 3-19 (incorporated by reference herein)) have expanded the ability to modify nucleic acid molecules by introducing nucleotide modifications to enhance their nuclease stability, as described above.

[0427] In one embodiment, nucleic acid molecules of the invention include one or more (e.g., about 1, 2, 3, 4, 5, 6, 7, 8, 9, 10, or more) G-clamp nucleotides. A G-clamp nucleotide is a modified cytosine analog wherein the modifications confer the ability to hydrogen bond both Watson-Crick and Hoogsteen faces of a complementary guanine within a duplex, see for example Lin and Matteucci, 1998, J Am. Chem. Soc., 120, 8531-8532. A single G-clamp analog substitution within an oligonucleotide can result in substantially enhanced helical thermal stability and mismatch discrimination when hybridized to complementary oligonucleotides. The inclusion of such nucleotides in nucleic acid molecules of the invention results in both enhanced affinity and specificity to nucleic acid targets, complementary sequences, or template strands. In another embodiment, nucleic acid molecules of the invention include one or more (e.g., about 1, 2, 3, 4, 5, 6, 7, 8, 9, 10, or more) LNA “locked nucleic acid” nucleotides such as a 2′, 4′-C methylene bicyclo nucleotide (see for example Wengel et aL., International PCT Publication No. WO 00/66604 and WO 99/14226).

[0428] In another embodiment, the invention features conjugates and/or complexes of siNA molecules of the invention. Such conjugates and/or complexes can be used to facilitate delivery of siNA molecules into a biological system, such as a cell. The conjugates and complexes provided by the instant invention can impart therapeutic activity by transferring therapeutic compounds across cellular membranes, altering the pharmacokinetics, and/or modulating the localization of nucleic acid molecules of the invention. The present invention encompasses the design and synthesis of novel conjugates and complexes for the delivery of molecules, including, but not limited to, small molecules, lipids, cholesterol, phospholipids, nucleosides, nucleotides, nucleic acids, antibodies, toxins, negatively charged polymers and other polymers, for example proteins, peptides, hormones, carbohydrates, polyethylene glycols, or polyamines, across cellular membranes. In general, the transporters described are designed to be used either individually or as part of a multi-component system, with or without degradable linkers. These compounds are expected to improve delivery and/or localization of nucleic acid molecules of the invention into a number of cell types originating from different tissues, in the presence or absence of serum (see Sullenger and Cech, U.S. Pat. No. 5,854,038). Conjugates of the molecules described herein can be attached to biologically active molecules via linkers that are biodegradable, such as biodegradable nucleic acid linker molecules.

[0429] The term “biodegradable linker” as used herein, refers to a nucleic acid or non-nucleic acid linker molecule that is designed as a biodegradable linker to connect one molecule to another molecule, for example, a biologically active molecule to a siNA molecule of the invention or the sense and antisense strands of a siNA molecule of the invention. The biodegradable linker is designed such that its stability can be modulated for a particular purpose, such as delivery to a particular tissue or cell type. The stability of a nucleic acid-based biodegradable linker molecule can be modulated by using various chemistries, for example combinations of ribonucleotides, deoxyribonucleotides, and chemically-modified nucleotides, such as 2′-O-methyl, 2′-fluoro, 2′-amino, 2′-O-amino, 2′-C-allyl, 2′-O-allyl, and other 2′-modified or base modified nucleotides. The biodegradable nucleic acid linker molecule can be a dimer, trimer, tetramer or longer nucleic acid molecule, for example, an oligonucleotide of about 2, 3, 4, 5, 6, 7, 8, 9, 10, 11, 12, 13, 14, 15, 16, 17, 18, 19, or 20 nucleotides in length, or can comprise a single nucleotide with a phosphorus-based linkage, for example, a phosphoramidate or phosphodiester linkage. The biodegradable nucleic acid linker molecule can also comprise nucleic acid backbone, nucleic acid sugar, or nucleic acid base modifications.

[0430] The term “biodegradable” as used herein, refers to degradation in a biological system, for example, enzymatic degradation or chemical degradation.

[0431] The term “biologically active molecule” as used herein refers to compounds or molecules that are capable of eliciting or modifying a biological response in a system. Non-limiting examples of biologically active siNA molecules either alone or in combination with other molecules contemplated by the instant invention include therapeutically active molecules such as antibodies, cholesterol, hormones, antivirals, peptides, proteins, chemotherapeutics, small molecules, vitamins, co-factors, nucleosides, nucleotides, oligonucleotides, enzymatic nucleic acids, antisense nucleic acids, triplex forming oligonucleotides, 2,5-A chimeras, siNA, dsRNA, allozymes, aptamers, decoys and analogs thereof. Biologically active molecules of the invention also include molecules capable of modulating the pharmacokinetics and/or pharmacodynamics of other biologically active molecules, for example, lipids and polymers such as polyamines, polyamides, polyethylene glycol and other polyethers.

[0432] The term “phospholipid” as used herein, refers to a hydrophobic molecule comprising at least one phosphorus group. For example, a phospholipid can comprise a phosphorus-containing group and saturated or unsaturated alkyl group, optionally substituted with OH, COOH, oxo, amine, or substituted or unsubstituted aryl groups.

[0433] Therapeutic nucleic acid molecules (e.g., siNA molecules) delivered exogenously optimally are stable within cells until reverse transcription of the RNA has been modulated long enough to reduce the levels of the RNA transcript. The nucleic acid molecules are resistant to nucleases in order to function as effective intracellular therapeutic agents. Improvements in the chemical synthesis of nucleic acid molecules described in the instant invention and in the art have expanded the ability to modify nucleic acid molecules by introducing nucleotide modifications to enhance their nuclease stability as described above.

[0434] In yet another embodiment, siNA molecules having chemical modifications that maintain or enhance enzymatic activity of proteins involved in RNAi are provided. Such nucleic acids are also generally more resistant to nucleases than unmodified nucleic acids. Thus, in vitro and/or in vivo the activity should not be significantly lowered.

[0435] Use of the nucleic acid-based molecules of the invention will lead to better treatments by affording the possibility of combination therapies (e.g., multiple siNA molecules targeted to different genes; nucleic acid molecules coupled with known small molecule modulators; or intermittent treatment with combinations of molecules, including different motifs and/or other chemical or biological molecules). The treatment of subjects with siNA molecules can also include combinations of different types of nucleic acid molecules, such as enzymatic nucleic acid molecules (ribozymes), allozymes, antisense, 2,5-A oligoadenylate, decoys, and aptamers.

[0436] In another aspect a siNA molecule of the invention comprises one or more 5′ and/or a 3′-cap structure, for example, on only the sense siNA strand, the antisense siNA strand, or both siNA strands.

[0437] By “cap structure” is meant chemical modifications, which have been incorporated at either terminus of the oligonucleotide (see, for example, Adamic et al., U.S. Pat. No. 5,998,203, incorporated by reference herein). These terminal modifications protect the nucleic acid molecule from exonuclease degradation, and may help in delivery and/or localization within a cell. The cap may be present at the 5′-terminus (5′-cap) or at the 3′-terminal (3′-cap) or may be present on both termini. In non-limiting examples, the 5′-cap includes, but is not limited to, glyceryl, inverted deoxy abasic residue (moiety); 4′,5′-methylene nucleotide; 1-(beta-D-erythrofuranosyl) nucleotide, 4′-thio nucleotide; carbocyclic nucleotide; 1,5-anhydrohexitol nucleotide; L-nucleotides; alpha-nucleotides; modified base nucleotide; phosphorodithioate linkage; threo-pentofuranosyl nucleotide; acyclic 3′,4′-seco nucleotide; acyclic 3,4-dihydroxybutyl nucleotide; acyclic 3,5-dihydroxypentyl nucleotide, 3′-3′-inverted nucleotide moiety; 3′-3′-inverted abasic. moiety; 3′-2′-inverted nucleotide moiety; 3′-2′-inverted abasic moiety; 1,4-butanediol phosphate; 3′-phosphoramidate; hexylphosphate; aminohexyl phosphate; 3′-phosphate; 3′-phosphorothioate; phosphorodithioate; or bridging or non-bridging methylphosphonate moiety. Non-limiting examples of cap moieties are shown in FIG. 10.

[0438] Non-limiting examples of the 3′-cap include, but are not limited to, glyceryl, inverted deoxy abasic residue (moiety), 4′, 5′-methylene nucleotide; 1-(beta-D-erythrofuranosyl) nucleotide; 4′-thio nucleotide, carbocyclic nucleotide; 5′-amino-alkyl phosphate; 1,3-diamino-2-propyl phosphate; 3-aminopropyl phosphate; 6-aminohexyl phosphate; 1,2-aminododecyl phosphate; hydroxypropyl phosphate; 1,5-anhydrohexitol nucleotide; L-nucleotide; alpha-nucleotide; modified base nucleotide; phosphorodithioate; threo-pentofuranosyl nucleotide; acyclic 3′,4′-seco nucleotide; 3,4-dihydroxybutyl nucleotide; 3,5-dihydroxypentyl nucleotide, 5′-5′-inverted nucleotide moiety; 5′-5′-inverted abasic moiety; 5′-phosphoramidate; 5′-phosphorothioate; 1,4-butanediol phosphate; 5′-amino; bridging and/or non-bridging 5′-phosphoramidate, phosphorothioate and/or phosphorodithioate, bridging or non bridging methylphosphonate and 5′-mercapto moieties (for more details see Beaucage and Iyer, 1993, Tetrahedron 49, 1925; incorporated by reference herein).

[0439] By the term “non-nucleotide” is meant any group or compound which can be incorporated into a nucleic acid chain in the place of one or more nucleotide units, including either sugar and/or phosphate substitutions, and allows the remaining bases to exhibit their enzymatic activity. The group or compound is abasic in that it does not contain a commonly recognized nucleotide base, such as adenosine, guanine, cytosine, uracil or thymine and therefore lacks a base at the 1′-position.

[0440] An “alkyl” group refers to a saturated aliphatic hydrocarbon, including straight-chain, branched-chain, and cyclic alkyl groups. Preferably, the alkyl group has 1 to 12 carbons. More preferably, it is a lower alkyl of from 1 to 7 carbons, more preferably 1 to 4 carbons. The alkyl group can be substituted or unsubstituted. When substituted the substituted group(s) is preferably, hydroxyl, cyano, alkoxy, ═O, ═S, NO₂ or N(CH₃)₂, amino, or SH. The term also includes alkenyl groups that are unsaturated hydrocarbon groups containing at least one carbon-carbon double bond, including straight-chain, branched-chain, and cyclic groups. Preferably, the alkenyl group has 1 to 12 carbons. More preferably, it is a lower alkenyl of from 1 to 7 carbons, more preferably 1 to 4 carbons. The alkenyl group may be substituted or unsubstituted. When substituted the substituted group(s) is preferably, hydroxyl, cyano, alkoxy, ═O, ═S, N02, halogen, N(CH₃)₂, amino, or SH. The term “alkyl” also includes alkynyl groups that have an unsaturated hydrocarbon group containing at least one carbon-carbon triple bond, including straight-chain, branched-chain, and cyclic groups. Preferably, the alkynyl group has 1 to 12 carbons. More preferably, it is a lower alkynyl of from 1 to 7 carbons, more preferably 1 to 4 carbons. The alkynyl group may be substituted or unsubstituted. When substituted the substituted group(s) is preferably, hydroxyl, cyano, alkoxy, ═O, ═S, NO₂ or N(CH₃)₂, amino or SH.

[0441] Such alkyl groups can also include aryl, alkylaryl, carbocyclic aryl, heterocyclic aryl, amide and ester groups. An “aryl” group refers to an aromatic group that has at least one ring having a conjugated pi electron system and includes carbocyclic aryl, heterocyclic aryl and biaryl groups, all of which may be optionally substituted. The preferred substituent(s) of aryl groups are halogen, trihalomethyl, hydroxyl, SH, OH, cyano, alkoxy, alkyl, alkenyl, alkynyl, and amino groups. An “alkylaryl” group refers to an alkyl group (as described above) covalently joined to an aryl group (as described above). Carbocyclic aryl groups are groups wherein the ring atoms on the aromatic ring are all carbon atoms. The carbon atoms are optionally substituted. Heterocyclic aryl groups are groups having from 1 to 3 heteroatoms as ring atoms in the aromatic ring and the remainder of the ring atoms are carbon atoms. Suitable heteroatoms include oxygen, sulfur, and nitrogen, and include furanyl, thienyl, pyridyl, pyrrolyl, N-lower alkyl pyrrolo, pyrimidyl, pyrazinyl, imidazolyl and the like, all optionally substituted. An “amide” refers to an —C(O)—NH—R, where R is either alkyl, aryl, alkylaryl or hydrogen. An “ester” refers to an —C(O)—OR′, where R is either alkyl, aryl, alkylaryl or hydrogen.

[0442] By “nucleotide” as used herein is as recognized in the art to include natural bases (standard), and modified bases well known in the art. Such bases are generally located at the 1′ position of a nucleotide sugar moiety. Nucleotides generally comprise a base, sugar and a phosphate group. The nucleotides can be unmodified or modified at the sugar, phosphate and/or base moiety, (also referred to interchangeably as nucleotide analogs, modified nucleotides, non-natural nucleotides, non-standard nucleotides and other; see, for example, Usman and McSwiggen, supra; Eckstein et al., International PCT Publication No. WO 92/07065; Usman et al., International PCT Publication No. WO 93/15187; Uhlman & Peyman, supra, all are hereby incorporated by reference herein). There are several examples of modified nucleic acid bases known in the art as summarized by Limbach et al., 1994, Nucleic Acids Res. 22, 2183. Some of the non-limiting examples of base modifications that can be introduced into nucleic acid molecules include, inosine, purine, pyridin-4-one, pyridin-2-one, phenyl, pseudouracil, 2, 4, 6-trimethoxy benzene, 3-methyl uracil, dihydrouridine, naphthyl, aminophenyl, 5-alkylcytidines (e.g., 5-methylcytidine), 5-alkyluridines (e.g., ribothymidine), 5-halouridine (e.g., 5-bromouridine) or 6-azapyrimidines or 6-alkylpyrimidines (e.g. 6-methyluridine), propyne, and others (Burgin et al., 1996, Biochemistry, 35, 14090; Uhlman & Peyman, supra). By “modified bases” in this aspect is meant nucleotide bases other than adenine, guanine, cytosine and uracil at 1′ position or their equivalents.

[0443] In one embodiment, the invention features modified siNA molecules, with phosphate backbone modifications comprising one or more phosphorothioate, phosphorodithioate, methylphosphonate, phosphotriester, morpholino, amidate carbamate, carboxymethyl, acetamidate, polyamide, sulfonate, sulfonamide, sulfamate, formacetal, thioformacetal, and/or alkylsilyl, substitutions. For a review of oligonucleotide backbone modifications, see Hunziker and Leumann, 1995, Nucleic Acid Analogues: Synthesis and Properties, in Modern Synthetic Methods, VCH, 331-417, and Mesmaeker et al., 1994, Novel Backbone Replacements for Oligonucleotides, in Carbohydrate Modifications in Antisense Research, ACS, 24-39.

[0444] By “abasic” is meant sugar moieties lacking a nucleobase or having a hydrogen atom (H) or other other non-nucleobase chemical groups in place of a nucleobase at the 1′ position of the sugar moiety, see for example Adamic et al., U.S. Pat. No. 5,998,203. In one embodiment, an abasic moiety of the invention is a ribose, deoxyribose, or dideoxyribose sugar.

[0445] By “unmodified nucleoside” is meant one of the bases adenine, cytosine, guanine, thymine, or uracil joined to the 1′ carbon of β-D-ribo-furanose.

[0446] By “modified nucleoside” is meant any nucleotide base which contains a modification in the chemical structure of an unmodified nucleotide base, sugar and/or phosphate. Non-limiting examples of modified nucleotides are shown by Formulae I-VII and/or other modifications described herein.

[0447] In connection with 2′-modified nucleotides as described for the present invention, by “amino” is meant 2′-NH₂ or 2′-O- NH₂, which can be modified or unmodified. Such modified groups are described, for example, in Eckstein et al., U.S. Pat. No. 5,672,695 and Matulic-Adamic et al., U.S. Pat. No. 6,248,878, which are both incorporated by reference in their entireties.

[0448] Various modifications to nucleic acid siNA structure can be made to enhance the utility of these molecules. Such modifications will enhance shelf-life, half-life in vitro, stability, and ease of introduction of such oligonucleotides to the target site, e.g., to enhance penetration of cellular membranes, and confer the ability to recognize and bind to targeted cells.

Administration of Nucleic Acid Molecules

[0449] A siNA molecule of the invention can be adapted for use to prevent or treat diseases, traits, disorders, and/or conditions described herein or otherwise known in the art to be related to gene expression, and/or any other trait, disease, disorder or condition that is related to or will respond to the levels of a target polynucleotide or a protein expressed therefrom in a cell or tissue, alone or in combination with other therapies.

[0450] In one embodiment, a siNA composition of the invention can comprise a delivery vehicle, including liposomes, for administration to a subject, carriers and diluents and their salts, and/or can be present in pharmaceutically acceptable formulations. Methods for the delivery of nucleic acid molecules are described in Akhtar et al., 1992, Trends Cell Bio., 2, 139; Delivery Strategies for Antisense Oligonucleotide Therapeutics, ed. Akhtar, 1995, Maurer et al., 1999, MoL Membr. Biol., 16, 129-140; Hofland and Huang, 1999, Handb. Exp. Pharmacol., 137, 165-192; and Lee et al., 2000, ACS Symp. Ser., 752, 184-192, all of which are incorporated herein by reference. Beigelman et al., U.S. Pat. No. 6,395,713 and Sullivan et al., PCT WO 94/02595 further describe the general methods for delivery of nucleic acid molecules. These protocols can be utilized for the delivery of virtually any nucleic acid molecule. Nucleic acid molecules can be administered to cells by a variety of methods known to those of skill in the art, including, but not restricted to, encapsulation in liposomes, by iontophoresis, or by incorporation into other vehicles, such as biodegradable polymers, hydrogels, cyclodextrins (see for example Gonzalez et al., 1999, Bioconjugate Chem., 10, 1068-1074; Wang et al., International PCT publication Nos. WO 03/47518 and WO 03/46185), poly(lactic-co-glycolic)acid (PLGA) and PLCA microspheres (see for example US Patent 6,447,796 and US Patent Application Publication No. US 2002130430), biodegradable nanocapsules, and bioadhesive microspheres, or by proteinaceous vectors (O'Hare and Normand, International PCT Publication No. WO 00/53722). In another embodiment, the nucleic acid molecules of the invention can also be formulated or complexed with polyethyleneimine and derivatives thereof, such as polyethyleneimine-polyethyleneglycol-N-acetylgalactosamine (PEI-PEG-GAL) or polyethyleneimine-polyethyleneglycol-tri-N-acetylgalactosamine (PEI-PEG-triGAL) derivatives. In one embodiment, the nucleic acid molecules of the invention are formulated as described in United States Patent Application Publication No. 20030077829, incorporated by reference herein in its entirety.

[0451] In one embodiment, a siNA molecule of the invention is formulated as a composition described in U.S. Provisional patent application No. 60/678,531 and in related U.S. Provisional patent application No. 60/703,946, filed Jul. 29, 2005 (Vargeese et al.), both of which are incorporated by reference herein in their entirety. Such siNA formuations are generally referred to as “lipid nucleic acid particles” (LNP).

[0452] In one embodiment, a siNA molecule of the invention is complexed with membrane disruptive agents such as those described in U.S. Patent Application Publication No. 20010007666, incorporated by reference herein in its entirety including the drawings. In another embodiment, the membrane disruptive agent or agents and the siNA molecule are also complexed with a cationic lipid or helper lipid molecule, such as those lipids described in U.S. Patent No. 6,235,310, incorporated by reference herein in its entirety including the drawings. 104361 In one embodiment, a siNA molecule of the invention is complexed with delivery systems as described in U.S. Patent Application Publication No. 2003077829 and International PCT Publication Nos. WO 00/03683 and WO 02/087541, all incorporated by reference herein in their entirety including the drawings.

[0453] In one embodiment, the nucleic acid molecules of the invention are administered to skeletal tissues (e.g., bone, cartilage, tendon, ligament) or bone metastatic tumors via atelocollagen complexation or conjugation (see for example Takeshita et al., 2005, PNAS, 102, 12177-12182). Therefore, in one embodiment, the instant invention features one or more dsiNA molecules as a composition complexed with atelocollagen. In another embodiment, the instant invention features one or more siNA molecules conjugated to atelocollagen via a linker as described herein or otherwise known in the art.

[0454] In one embodiment, the nucleic acid molecules of the invention are administered via pulmonary delivery, such as by inhalation of an aerosol or spray dried formulation administered by an inhalation device or nebulizer, providing rapid local uptake of the nucleic acid molecules into relevant pulmonary tissues. Solid particulate compositions containing respirable dry particles of micronized nucleic acid compositions can be prepared by grinding dried or lyophilized nucleic acid compositions, and then passing the micronized composition through, for example, a 400 mesh screen to break up or separate out large agglomerates. A solid particulate composition comprising the nucleic acid compositions of the invention can optionally contain a dispersant which serves to facilitate the formation of an aerosol as well as other therapeutic compounds. A suitable dispersant is lactose, which can be blended with the nucleic acid compound in any suitable ratio, such as a 1 to 1 ratio by weight.

[0455] Aerosols of liquid particles comprising a nucleic acid composition of the invention can be produced by any suitable means, such as with a nebulizer (see for example U.S. Pat. No. 4,501,729). Nebulizers are commercially available devices which transfonm solutions or suspensions of an active ingredient into a therapeutic aerosol mist either by means of acceleration of a compressed gas, typically air or oxygen, through a narrow venturi orifice or by means of ultrasonic agitation. Suitable formulations for use in nebulizers comprise the active ingredient in a liquid carrier in an amount of up to 40% w/w preferably less than 20% w/w of the formulation. The carrier is typically water or a dilute aqueous alcoholic solution, preferably made isotonic with body fluids by the addition of, for example, sodium chloride or other suitable salts. Optional additives include preservatives if the formulation is not prepared sterile, for example, methyl hydroxybenzoate, anti-oxidants, flavorings, volatile oils, buffering agents and emulsifiers and other formulation surfactants. The aerosols of solid particles comprising the active composition and surfactant can likewise be produced with any solid particulate aerosol generator. Aerosol generators for administering solid particulate therapeutics to a subject produce particles which are respirable, as explained above, and generate a volume of aerosol containing a predetermined metered dose of a therapeutic composition at a rate suitable for human administration.

[0456] In one embodiment, a solid particulate aerosol generator of the invention is an insufflator. Suitable fonnulations for administration by insufflation include finely comminuted powders which can be delivered by means of an insufflator. In the insufflator, the powder, e.g., a metered dose thereof effective to carry out the treatments described herein, is contained in capsules or cartridges, typically made of gelatin or plastic, which are either pierced or opened in situ and the powder delivered by air drawn through the device upon inhalation or by means of a manually-operated pump. The powder employed in the insufflator consists either solely of the active ingredient or of a powder blend comprising the active ingredient, a suitable powder diluent, such as lactose, and an optional surfactant. The active ingredient typically comprises from 0.1 to 100 w/w of the formulation. A second type of illustrative aerosol generator comprises a metered dose inhaler. Metered dose inhalers are pressurized aerosol dispensers, typically containing a suspension or solution formulation of the active ingredient in a liquified propellant. During use these devices discharge the formulation through a valve adapted to deliver a metered volume to produce a fine particle spray containing the active ingredient. Suitable propellants include certain chlorofluorocarbon compounds, for example, dichlorodifluoromethane, trichlorofluoromethane, dichlorotetrafluoroethane and mixtures thereof. The formulation can additionally contain one or more co-solvents, for example, ethanol, emulsifiers and other formulation surfactants, such as oleic acid or sorbitan trioleate, anti-oxidants and suitable flavoring agents. Other methods for pulmonary delivery are described in, for example US patent application Ser. No. 20040037780, and U.S. Pat. Nos. 6,592,904; 6,582,728; 6,565,885, all incorporated by reference herein.

[0457] In one embodiment, the invention features the use of methods to deliver the nucleic acid molecules of the instant invention to the central nervous system and/or peripheral nervous system. Experiments have demonstrated the efficient in vivo uptake of nucleic acids by neurons. As an example of local administration of nucleic acids to nerve cells, Sommer et al., 1998, Antisense Nuc. Acid Drug Dev., 8, 75, describe a study in which a 15mer phosphorothioate antisense nucleic acid molecule to c-fos is administered to rats via microinjection into the brain. Antisense molecules labeled with tetramethylrhodamine-isothiocyanate (TRITC) or fluorescein isothiocyanate (FITC) were taken up by exclusively by neurons thirty minutes post-injection. A diffuse cytoplasmic staining and nuclear staining was observed in these cells. As an example of systemic administration of nucleic acid to nerve cells, Epa et al., 2000, Antisense Nuc. Acid Drug Dev., 10, 469, describe an in vivo mouse study in which beta-cyclodextrin-adamantane-oligonucleotide conjugates were used to target the p75 neurotrophin receptor in neuronally differentiated PC 12 cells. Following a two week course of IP administration, pronounced uptake of p75 neurotrophin receptor antisense was observed in dorsal root ganglion (DRG) cells. In addition, a marked and consistent down-regulation of p75 was observed in DRG neurons. Additional approaches to the targeting of nucleic acid to neurons are described in Broaddus et al., 1998, J Neurosurg., 88(4), 734; Karle et al., 1997, Eur. J. Pharmocol., 340(2/3), 153; Bannai et al., 1998, Brain Research, 784(1,2), 304; Rajakumar et al., 1997, Synapse, 26(3), 199; Wu-pong et al., 1999, BioPharm, 12(1), 32; Bannai et al., 1998, Brain Res. Protoc., 3(1), 83; Simantov et al., 1996, Neuroscience, 74(1), 39. Nucleic acid molecules of the invention are therefore amenable to delivery to and uptake by cells that express repeat expansion allelic variants for modulation of RE gene expression. The delivery of nucleic acid molecules of the invention, targeting RE is provided by a variety of different strategies. Traditional approaches to CNS delivery that can be used include, but are not limited to, intrathecal and intracerebroventricular administration, implantation of catheters and pumps, direct injection or perfusion at the site of injury or lesion, injection into the brain arterial system, or by chemical or osmotic opening of the blood-brain barrier. Other approaches can include the use of various transport and carrier systems, for example though the use of conjugates and biodegradable polymers. Furthermore, gene therapy approaches, for example as described in Kaplitt et al., U.S. Pat. No. 6,180,613 and Davidson, WO 04/013280, can be used to express nucleic acid molecules in the CNS.

[0458] The delivery of nucleic acid molecules of the invention to the CNS is provided by a variety of different strategies. Traditional approaches to CNS delivery that can be used include, but are not limited to, intrathecal and intracerebroventricular administration, implantation of catheters and pumps, direct injection or perfusion at the site of injury or lesion, injection into the brain arterial system, or by chemical or osmotic opening of the blood-brain barrier. Other approaches can include the use of various transport and carrier systems, for example though the use of conjugates and biodegradable polymers. Furthermore, gene therapy approaches, for example as described in Kaplitt et al., U.S. Pat. No. 6,180,613 and Davidson, WO 04/013280, can be used to express nucleic acid molecules in the CNS.

[0459] In one embodiment, a siNA molecule of the invention is administered iontophoretically, for example to a particular organ or compartment. Non-limiting examples of iontophoretic delivery are described in, for example, WO 03/043689 and WO 03/030989, which are incorporated by reference in their entireties herein.

[0460] In one embodiment, the siNA molecules of the invention and formulations or compositions thereof are administered to the liver as is generally known in the art (see for example Wen et al., 2004, World J Gastroenterol., 10, 244-9; Murao et al., 2002, Pharm Res., 19, 1808-14; Liu et al., 2003, Gene Ther., 10, 180-7; Hong et al., 2003, J Pharm Pharmacol., 54, 51-8; Herrmann et al., 2004, Arch Virol., 149, 1611-7; and Matsuno et aL, 2003, Gene Ther., 10, 1559-66).

[0461] In one embodiment, the invention features the use of methods to deliver the nucleic acid molecules of the instant invention to hematopoietic cells, including monocytes and lymphocytes. These methods are described in detail by Hartmann et al., 1998, J Phamacol. Exp. Ther., 285(2), 920-928; Kronenwett et al., 1998, Blood, 91(3), 852-862; Filion and Phillips, 1997, Biochim. Biophys. Acta., 1329(2), 345-356; Ma and Wei, 1996, Leuk. Res., 20(11/12), 925-930; and Bongartz et al., 1994, Nucleic Acids Research, 22(22), 4681-8. Such methods, as described above, include the use of free oligonucleitide, cationic lipid formulations, liposome formulations including pH sensitive liposomes and immunoliposomes, and bioconjugates including oligonucleotides conjugated to fusogenic peptides, for the transfection of hematopoietic cells with oligonucleotides. 104461 In one embodiment, delivery systems of the invention include, for example, aqueous and nonaqueous gels, creams, multiple emulsions, microemulsions, liposomes, ointments, aqueous and nonaqueous solutions, lotions, aerosols, hydrocarbon bases and powders, and can contain excipients such as solubilizers, permeation enhancers (e.g., fatty acids, fatty acid esters, fatty alcohols and amino acids), and hydrophilic polymers (e.g., polycarbophil and polyvinylpyrolidone). In one embodiment, the pharmaceutically acceptable carrier is a liposome or a transdermal enhancer. Examples of liposomes which can be used in this invention include the following: (1) CellFectin, 1:1.5 (M/M) liposome formulation of the cationic lipid N,NI,NII,NIII-tetramethyl-N,NI,NII,NIII-tetrapalmit-y-spermine and dioleoyl phosphatidylethanolamine (DOPE) (GIBCO BRL); (2) Cytofectin GSV, 2:1 (M/M) liposome formulation of a cationic lipid and DOPE (Glen Research); (3) DOTAP (N-[1-(2,3-dioleoyloxy)-N,N,N-tri-methyl-ammoniummethylsulfate) (Boehringer Manheim); and (4) Lipofectamine, 3:1 (M/M) liposome formulation of the polycationic lipid DOSPA and the neutral lipid DOPE (GIBCO BRL).

[0462] In one embodiment, delivery systems of the invention include patches, tablets, suppositories, pessaries, gels and creams, and can contain excipients such as solubilizers and enhancers (e.g., propylene glycol, bile salts and amino acids), and other vehicles (e.g., polyethylene glycol, fatty acid esters and derivatives, and hydrophilic polymers such as hydroxypropylmethylcellulose and hyaluronic acid).

[0463] In one embodiment, a siNA molecule of the invention is administered iontophoretically, for example to the dermis or to other relevant tissues such as the inner ear/cochlea. Non-limiting examples of iontophoretic delivery are described in, for example, WO 03/043689 and WO 03/030989, which are incorporated by reference in their entireties herein.

[0464] In one embodiment, siNA molecules of the invention are formulated or complexed with polyethylenimine (e.g., linear or branched PEI) and/or polyethylenimine derivatives, including for example grafted PEIs such as galactose PEI, cholesterol PEI, antibody derivatized PEI, and polyethylene glycol PEI (PEG-PEI) derivatives thereof (see for example Ogris et al., 2001, AAPA PharmSci, 3, 1-11; Furgeson et al., 2003, Bioconjugate Chem., 14, 840-847; Kunath et al., 2002, Phramaceutical Research, 19, 810-817; Choi et al., 2001, Bull. Korean Chem. Soc., 22, 46-52; Bettinger et al., 1999, Bioconjugate Chem., 10, 558-561; Peterson et al., 2002, Bioconjugate Chem., 13, 845-854; Erbacher et al., 1999, Journal of Gene Medicine Preprint, 1, 1-18; Godbey et al., 1999., PNAS USA, 96, 5177-5181; Godbey et al., 1999, Journal of Controlled Release, 60, 149-160; Diebold et al., 1999, Journal of Biological Chemistry, 274, 19087-19094; Thomas and Klibanov, 2002, PNAS USA, 99, 14640-14645; and Sagara, U.S. Pat. No.6,586,524, incorporated by reference herein.

[0465] In one embodiment, a siNA molecule of the invention comprises a bioconjugate, for example a nucleic acid conjugate as described in Vargeese et al., U.S. Ser. No. 10/427,160, filed Apr. 30, 2003; U.S. Pat. No. 6,528,631; U.S. Pat. No. 6,335,434; U.S. Pat. No. 6, 235,886; U.S. Pat. No. 6,153,737; U.S. Pat. No. 5,214,136; U.S. Pat. No. 5,138,045, all incorporated by reference herein.

[0466] Thus, the invention features a pharmaceutical composition comprising one or more nucleic acid(s) of the invention in an acceptable carrier, such as a stabilizer, buffer, and the like. The polynucleotides of the invention can be administered (e.g., RNA, DNA or protein) and introduced to a subject by any standard means, with or without stabilizers, buffers, and the like, to form a pharmaceutical composition. When it is desired to use a liposome delivery mechanism, standard protocols for formation of liposomes can be followed. The compositions of the present invention can also be formulated and used as creams, gels, sprays, oils and other suitable compositions for topical, dermal, or transdermal administration as is known in the art.

[0467] The present invention also includes pharmaceutically acceptable formulations of the compounds described. These formulations include salts of the above compounds, e.g., acid addition salts, for example, salts of hydrochloric, hydrobromic, acetic acid, and benzene sulfonic acid.

[0468] A pharmacological composition or formulation refers to a composition or formulation in a form suitable for administration, e.g., systemic or local administration, into a cell or subject, including for example a human. Suitable forms, in part, depend upon the use or the route of entry, for example oral, transdermal, or by injection. Such forms should not prevent the composition or formulation from reaching a target cell (i.e., a cell to which the negatively charged nucleic acid is desirable for delivery). For example, pharmacological compositions injected into the blood stream should be soluble. Other factors are known in the art, and include considerations such as toxicity and forms that prevent the composition or formulation from exerting its effect.

[0469] In one embodiment, siNA molecules of the invention are administered to a subject by systemic administration in a pharmaceutically acceptable composition or formulation. By “systemic administration” is meant in vivo systemic absorption or accumulation of drugs in the blood stream followed by distribution throughout the entire body. Administration routes that lead to systemic absorption include, without limitation: intravenous, subcutaneous, portal vein, intraperitoneal, inhalation, oral, intrapulmonary and intramuscular. Each of these administration routes exposes the siNA molecules of the invention to an accessible diseased tissue. The rate of entry of a drug into the circulation has been shown to be a function of molecular weight or size. The use of a liposome or other drug carrier comprising the compounds of the instant invention can potentially localize the drug, for example, in certain tissue types, such as the tissues of the reticular endothelial system (RES). A liposome formulation that can facilitate the association of drug with the surface of cells, such as, lymphocytes and macrophages is also useful. This approach can provide enhanced delivery of the drug to target cells by taking advantage of the specificity of macrophage and lymphocyte immune recognition of abnormal cells.

[0470] By “pharmaceutically acceptable formulation” or “pharmaceutically acceptable composition” is meant, a composition or formulation that allows for the effective distribution of the nucleic acid molecules of the instant invention in the physical location most suitable for their desired activity. Non-limiting examples of agents suitable for formulation with the nucleic acid molecules of the instant invention include: P-glycoprotein inhibitors (such as Pluronic P85),; biodegradable polymers, such as poly (DL-lactide-coglycolide) microspheres for sustained release delivery (Emerich, DF et al, 1999, Cell Transplant, 8, 47-58); and loaded nanoparticles, such as those made of polybutylcyanoacrylate. Other non-limiting examples of delivery strategies for the nucleic acid molecules of the instant invention include material described in Boado et al., 1998, J Pharm. Sci., 87, 1308-1315; Tyler et al., 1999, FEBS Lett., 421, 280-284; Pardridge et al., 1995, PNAS USA., 92, 5592-5596; Boado, 1995, Adv. Drug Delivery Rev., 15, 73-107; Aldrian-Herrada et al., 1998, Nucleic Acids Res., 26, 4910-4916; and Tyler et al., 1999, PNAS USA., 96, 7053-7058.

[0471] The invention also features the use of a composition comprising surface-modified liposomes containing poly (ethylene glycol) lipids (PEG-modified, or long-circulating liposomes or stealth liposomes) and nucleic acid molecules of the invention. These formulations offer a method for increasing the accumulation of drugs (e.g., siNA) in target tissues. This class of drug carriers resists opsonization and elimination by the mononuclear phagocytic system (MPS or RES), thereby enabling longer blood circulation times and enhanced tissue exposure for the encapsulated drug (Lasic et al. Chem. Rev. 1995, 95, 2601-2627; Ishiwata et al., Chem. Pharm. Bull. 1995, 43, 1005-1011). Such liposomes have been shown to accumulate selectively in tumors, presumably by extravasation and capture in the neovascularized target tissues (Lasic et al., Science 1995, 267, 1275-1276; Oku et al.,1995, Biochim. Biophys. Acta, 1238, 86-90). The long-circulating liposomes enhance the pharmacokinetics and pharmacodynamics of DNA and RNA, particularly compared to conventional cationic liposomes which are known to accumulate in tissues of the MPS (Liu et al., J Biol. Chem. 1995, 42, 24864-24870; Choi et al., International PCT Publication No. WO 96/10391; Ansell et al., International PCT Publication No. WO 96/10390; Holland et al., International PCT Publication No. WO 96/10392). Long-circulating liposomes are also likely to protect drugs from nuclease degradation to a greater extent compared to cationic liposomes, based on their ability to avoid accumulation in metabolically aggressive MPS tissues such as the liver and spleen.

[0472] The present invention also includes compositions prepared for storage or administration that include a pharmaceutically effective amount of the desired compounds in a pharmaceutically acceptable carrier or diluent. Acceptable carriers or diluents for therapeutic use are well known in the pharmaceutical art, and are described, for example, in Remington's Pharmaceutical Sciences, Mack Publishing Co. (A.R. Gennaro edit. 1985), hereby incorporated by reference herein. For example, preservatives, stabilizers, dyes and flavoring agents can be provided. These include sodium benzoate, sorbic acid and esters of p-hydroxybenzoic acid. In addition, antioxidants and suspending agents can be used.

[0473] A pharmaceutically effective dose is that dose required to prevent, inhibit the occurrence, or treat (alleviate a symptom to some extent, preferably all of the symptoms) of a disease state. The pharmaceutically effective dose depends on the type of disease, the composition used, the route of administration, the type of mammal being treated, the physical characteristics of the specific mammal under consideration, concurrent medication, and other factors that those skilled in the medical arts will recognize. Generally, an amount between 0.1 mg/kg and 100 mg/kg body weight/day of active ingredients is administered dependent upon potency of the negatively charged polymer.

[0474] The nucleic acid molecules of the invention and formulations thereof can be administered orally, topically, parenterally, by inhalation or spray, or rectally in dosage unit formulations containing conventional non-toxic pharmaceutically acceptable carriers, adjuvants and/or vehicles. The term parenteral as used herein includes percutaneous, subcutaneous, intravascular (e.g., intravenous), intramuscular, or intrathecal injection or infusion techniques and the like. In addition, there is provided a pharmaceutical formulation comprising a nucleic acid molecule of the invention and a pharmaceutically acceptable carrier. One or more nucleic acid molecules of the invention can be present in association with one or more non-toxic pharmaceutically acceptable carriers and/or diluents and/or adjuvants, and if desired other active ingredients. The pharmaceutical compositions containing nucleic acid molecules of the invention can be in a form suitable for oral use, for example, as tablets, troches, lozenges, aqueous or oily suspensions, dispersible powders or granules, emulsion, hard or soft capsules, or syrups or elixirs.

[0475] Compositions intended for oral use can be prepared according to any method known to the art for the manufacture of pharmaceutical compositions and such compositions can contain one or more such sweetening agents, flavoring agents, coloring agents or preservative agents in order to provide pharmaceutically elegant and palatable preparations. Tablets contain the active ingredient in admixture with non-toxic pharmaceutically acceptable excipients that are suitable for the manufacture of tablets. These excipients can be, for example, inert diluents; such as calcium carbonate, sodium carbonate, lactose, calcium phosphate or sodium phosphate; granulating and disintegrating agents, for example, corn starch, or alginic acid; binding agents, for example starch, gelatin or acacia; and lubricating agents, for example magnesium stearate, stearic acid or talc. The tablets can be uncoated or they can be coated by known techniques. In some cases such coatings can be prepared by known techniques to delay disintegration and absorption in the gastrointestinal tract and thereby provide a sustained action over a longer period. For example, a time delay material such as glyceryl monosterate or glyceryl distearate can be employed.

[0476] Formulations for oral use can also be presented as hard gelatin capsules wherein the active ingredient is mixed with an inert solid diluent, for example, calcium carbonate, calcium phosphate or kaolin, or as soft gelatin capsules wherein the active ingredient is mixed with water or an oil medium, for example peanut oil, liquid paraffin or olive oil.

[0477] Aqueous suspensions contain the active materials in a mixture with excipients suitable for the manufacture of aqueous suspensions. Such excipients are suspending agents, for example sodium carboxymethylcellulose, methylcellulose, hydropropyl-methylcellulose, sodium alginate, polyvinylpyrrolidone, gum tragacanth and gum acacia; dispersing or wetting agents can be a naturally-occurring phosphatide, for example, lecithin, or condensation products of an alkylene oxide with fatty acids, for example polyoxyethylene stearate, or condensation products of ethylene oxide with long chain aliphatic alcohols, for example heptadecaethyleneoxycetanol, or condensation products of ethylene oxide with partial esters derived from fatty acids and a hexitol such as polyoxyethylene sorbitol monooleate, or condensation products of ethylene oxide with partial esters derived from fatty acids and hexitol anhydrides, for example polyethylene sorbitan monooleate. The aqueous suspensions can also contain one or more preservatives, for example ethyl, or n-propyl p-hydroxybenzoate, one or more coloring agents, one or more flavoring agents, and one or more sweetening agents, such as sucrose or saccharin.

[0478] Oily suspensions can be formulated by suspending the active ingredients in a vegetable oil, for example arachis oil, olive oil, sesame oil or coconut oil, or in a mineral oil such as liquid paraffin. The oily suspensions can contain a thickening agent, for example beeswax, hard paraffin or cetyl alcohol. Sweetening agents and flavoring agents can be added to provide palatable oral preparations. These compositions can be preserved by the addition of an anti-oxidant such as ascorbic acid

[0479] Dispersible powders and granules suitable for preparation of an aqueous suspension by the addition of water provide the active ingredient in admixture with a dispersing or wetting agent, suspending agent and one or more preservatives. Suitable dispersing or wetting agents or suspending agents are exemplified by those already mentioned above. Additional excipients, for example sweetening, flavoring and coloring agents, can also be present.

[0480] Pharmaceutical compositions of the invention can also be in the form of oil-in-water emulsions. The oily phase can be a vegetable oil or a mineral oil or mixtures of these. Suitable emulsifying agents can be naturally-occurring gums, for example gum acacia or gum tragacanth, naturally-occurring phosphatides, for example soy bean, lecithin, and esters or partial esters derived from fatty acids and hexitol, anhydrides, for example sorbitan monooleate, and condensation products of the said partial esters with ethylene oxide, for example polyoxyethylene sorbitan monooleate. The emulsions can also contain sweetening and flavoring agents.

[0481] Syrups and elixirs can be formulated with sweetening agents, for example glycerol, propylene glycol, sorbitol, glucose or sucrose. Such formulations can also contain a demulcent, a preservative and flavoring and coloring agents. The pharmaceutical compositions can be in the form of a sterile injectable aqueous or oleaginous suspension. This suspension can be formulated according to the known art using those suitable dispersing or wetting agents and suspending agents that have been mentioned above. The sterile injectable preparation can also be a sterile injectable solution or suspension in a non-toxic parentally acceptable diluent or solvent, for example as a solution in 1,3-butanediol. Among the acceptable vehicles and solvents that can be employed are water, Ringer's solution and isotonic sodium chloride solution. In addition, sterile, fixed oils are conventionally employed as a solvent or suspending medium. For this purpose, any bland fixed oil can be employed including synthetic mono-or diglycerides. In addition, fatty acids such as oleic acid find use in the preparation of injectables.

[0482] The nucleic acid molecules of the invention can also be administered in the form of suppositories, e.g., for rectal administration of the drug. These compositions can be prepared by mixing the drug with a suitable non-irritating excipient that is solid at ordinary temperatures but liquid at the rectal temperature and will therefore melt in the rectum to release the drug. Such materials include cocoa butter and polyethylene glycols.

[0483] Nucleic acid molecules of the invention can be administered parenterally in a sterile medium. The drug, depending on the vehicle and concentration used, can either be suspended or dissolved in the vehicle. Advantageously, adjuvants such as local anesthetics, preservatives and buffering agents can be dissolved in the vehicle.

[0484] Dosage levels of the order of from about 0.1 mg to about 140 mg per kilogram of body weight per day are useful in the treatment of the above-indicated conditions (about 0.5 mg to about 7 g per subject per day). The amount of active ingredient that can be combined with the carrier materials to produce a single dosage form varies depending upon the host treated and the particular mode of administration. Dosage unit forms generally contain between from about 1 mg to about 500 mg of an active ingredient.

[0485] It is understood that the specific dose level for any particular subject depends upon a variety of factors including the activity of the specific compound employed, the age, body weight, general health, sex, diet, time of administration, route of administration, and rate of excretion, drug combination and the severity of the particular disease undergoing therapy.

[0486] For administration to non-human animals, the composition can also be added to the animal feed or drinking water. It can be convenient to formulate the animal feed and drinking water compositions so that the animal takes in a therapeutically appropriate quantity of the composition along with its diet. It can also be convenient to present the composition as a premix for addition to the feed or drinking water.

[0487] The nucleic acid molecules of the present invention can also be administered to a subject in combination with other therapeutic compounds to increase the overall therapeutic effect. The use of multiple compounds to treat an indication can increase the beneficial effects while reducing the presence of side effects.

[0488] In one embodiment, the invention comprises compositions suitable for administering nucleic acid molecules of the invention to specific cell types. For example, the asialoglycoprotein receptor (ASGPr) (Wu and Wu, 1987, J Biol. Chem. 262, 4429-4432) is unique to hepatocytes and binds branched galactose-terminal glycoproteins, such as asialoorosomucoid (ASOR). In another example, the folate receptor is overexpressed in many cancer cells. Binding of such glycoproteins, synthetic glycoconjugates, or folates to the receptor takes place with an affinity that strongly depends on the degree of branching of the oligosaccharide chain, for example, triatennary structures are bound with greater affinity than biatenarry or monoatennary chains (Baenziger and Fiete, 1980, Cell, 22, 611-620; Connolly et al., 1982, J Biol. Chem., 257, 939-945). Lee and Lee, 1987, Glycoconjugate J., 4, 317-328, obtained this high specificity through the use of N-acetyl-D-galactosamine as the carbohydrate moiety, which has higher affinity for the receptor, compared to galactose. This “clustering effect” has also been described for the binding and uptake of mannosyl-terminating glycoproteins or glycoconjugates (Ponpipom et al., 1981, J Med. Chem., 24, 1388-1395). The use of galactose, galactosamine, or folate based conjugates to transport exogenous compounds across cell membranes can provide a targeted delivery approach to, for example, the treatment of liver disease, cancers of the liver, or other cancers. The use of bioconjugates can also provide a reduction in the required dose of therapeutic compounds required for treatment. Furthermore, therapeutic bioavailability, pharmacodynamics, and pharmacokinetic parameters can be modulated through the use of nucleic acid bioconjugates of the invention. Non-limiting examples of such bioconjugates are described in Vargeese et al., U.S. Ser. No. 10/201,394, filed Aug. 13, 2001; and Matulic-Adamic et al., U.S. Ser.No. 60/362,016, filed Mar. 6, 2002.

[0489] Alternatively, certain siNA molecules of the instant invention can be expressed within cells from eukaryotic promoters (e.g., Izant and Weintraub, 1985, Science, 229, 345; McGarry and Lindquist, 1986, Proc. Natl. Acad. Sci., USA 83, 399; Scanlon et al., 1991, Proc. NatL. Acad. Sci. USA, 88, 10591-5; Kashani-Sabet et al., 1992, Antisense Res. Dev., 2, 3-15; Dropulic et al., 1992, J Virol., 66, 1432-41; Weerasinghe et al., 1991, J Virol., 65, 5531-4; Ojwang et al., 1992, Proc. NatL Acad. Sci. USA, 89, 10802-6; Chen et al., 1992, Nucleic Acids Res., 20, 4581-9; Sarver et al., 1990 Science, 247, 1222-1225; Thompson et al., 1995, Nucleic Acids Res., 23, 2259; Good et al., 1997, Gene Therapy, 4, 45. Those skilled in the art realize that any nucleic acid can be expressed in eukaryotic cells from the appropriate DNA/RNA vector. The activity of such nucleic acids can be augmented by their release from the primary transcript by a enzymatic nucleic acid (Draper et al., PCT WO 93/23569, and Sullivan et al., PCT WO 94/02595; Ohkawa et al., 1992, Nucleic Acids Symp. Ser., 27, 15-6; Taira et al., 1991, Nucleic Acids Res., 19, 5125-30; Ventura et al., 1993, Nucleic Acids Res., 21, 3249-55; Chowrira et al., 1994, J Biol. Chem., 269, 25856.

[0490] In another aspect of the invention, RNA molecules of the present invention can be expressed from transcription units (see for example Couture et al., 1996, TIG., 12, 510) inserted into DNA or RNA vectors. The recombinant vectors can be DNA plasmids or viral vectors. siNA expressing viral vectors can be constructed based on, but not limited to, adeno-associated virus, retrovirus, adenovirus, or alphavirus. In another embodiment, pol III based constructs are used to express nucleic acid molecules of the invention (see for example Thompson, U.S. Pats. Nos. 5,902,880 and 6,146,886). The recombinant vectors capable of expressing the siNA molecules can be delivered as described above, and persist in target cells. Alternatively, viral vectors can be used that provide for transient expression of nucleic acid molecules. Such vectors can be repeatedly administered as necessary. Once expressed, the siNA molecule interacts with the target mRNA and generates an RNAi response. Delivery of siNA molecule expressing vectors can be systemic, such as by intravenous or intra-muscular administration, by administration to target cells ex-planted from a subject followed by reintroduction into the subject, or by any other means that would allow for introduction into the desired target cell (for a review see Couture et al., 1996, TIG., 12, 510).

[0491] In one aspect the invention features an expression vector comprising a nucleic acid sequence encoding at least one siNA molecule of the instant invention. The expression vector can encode one or both strands of a siNA duplex, or a single self-complementary strand that self hybridizes into a siNA duplex. The nucleic acid sequences encoding the siNA molecules of the instant invention can be operably linked in a manner that allows expression of the siNA molecule (see for example Paul et al., 2002, Nature Biotechnology, 19, 505; Miyagishi and Taira, 2002, Nature Biotechnology, 19, 497; Lee et al., 2002, Nature Biotechnology, 19, 500; and Novina et al., 2002, Nature Medicine, advance online publication doi: 10.1038/nm725).

[0492] In another aspect, the invention features an expression vector comprising: a) a transcription initiation region (e.g., eukaryotic pol I, II or III initiation region); b) a transcription termination region (e.g., eukaryotic pol I, II or III termination region); and c) a nucleic acid sequence encoding at least one of the siNA molecules of the instant invention, wherein said sequence is operably linked to said initiation region and said termination region in a manner that allows expression and/or delivery of the siNA molecule. The vector can optionally include an open reading frame (ORF) for a protein operably linked on the 5′ side or the 3′-side of the sequence encoding the siNA of the invention; and/or an intron (intervening sequences).

[0493] Transcription of the siNA molecule sequences can be driven from a promoter for eukaryotic RNA polymerase I (pol I), RNA polymerase II (pol 11), or RNA polymerase III (pol III). Transcripts from pol II or pol III promoters are expressed at high levels in all cells; the levels of a given pol II promoter in a given cell type depends on the nature of the gene regulatory sequences (enhancers, silencers, etc.) present nearby. Prokaryotic RNA polymerase promoters are also used, providing that the prokaryotic RNA polymerase enzyme is expressed in the appropriate cells (Elroy-Stein and Moss, 1990, Proc. Natl. Acad. Sci. U S A, 87, 6743-7; Gao and Huang 1993, Nucleic Acids Res., 21, 2867-72; Lieber et al., 1993, Methods Enzymol., 217, 47-66; Zhou et al., 1990, Mol. Cell. Biol., 10, 4529-37). Several investigators have demonstrated that nucleic acid molecules expressed from such promoters can function in mammalian cells (e.g. Kashani-Sabet et al., 1992, Antisense Res. Dev., 2, 3-15; Ojwang et al., 1992, Proc. Natl. Acad. Sci. USA, 89, 10802-6; Chen et al., 1992, Nucleic Acids Res., 20, 4581-9; Yu et al., 1993, Proc. Natl. Acad. Sci. USA, 90, 6340-4; L'Huillier et al., 1992, EMBO J, 11, 4411-8; Lisziewicz et al., 1993, Proc. Natl. Acad. Sci. U.S.A, 90, 8000-4; Thompson et al., 1995, Nucleic Acids Res., 23, 2259; Sullenger & Cech, 1993, Science, 262, 1566). More specifically, transcription units such as the ones derived from genes encoding U6 small nuclear (snRNA), transfer RNA (tRNA) and adenovirus VA RNA are useful in generating high concentrations of desired RNA molecules such as siNA in cells (Thompson et al., supra; Couture and Stinchcomb, 1996, supra; Noonberg et al., 1994, Nucleic Acid Res., 22, 2830; Noonberg et al., U.S. Pat. No. 5,624,803; Good et al., 1997, Gene Ther., 4, 45; Beigelman et al., International PCT Publication No. WO 96/18736. The above siNA transcription units can be incorporated into a variety of vectors for introduction into mammalian cells, including but not restricted to, plasmid DNA vectors, viral DNA vectors (such as adenovirus or adeno-associated virus vectors), or viral RNA vectors (such as retroviral or alphavirus vectors) (for a review see Couture and Stinchcomb, 1996, supra).

[0494] In another aspect the invention features an expression vector comprising a nucleic acid sequence encoding at least one of the siNA molecules of the invention in a manner that allows expression of that siNA molecule. The expression vector comprises in one embodiment; a) a transcription initiation region; b) a transcription termination region; and c) a nucleic acid sequence encoding at least one strand of the siNA molecule, wherein the sequence is operably linked to the initiation region and the termination region in a manner that allows expression and/or delivery of the siNA molecule.

[0495] In another embodiment the expression vector comprises: a) a transcription initiation region; b) a transcription termination region; c) an open reading frame; and d) a nucleic acid sequence encoding at least one strand of a siNA molecule, wherein the sequence is operably linked to the 3′-end of the open reading frame and wherein the sequence is operably linked to the initiation region, the open reading frame and the termination region in a manner that allows expression and/or delivery of the siNA molecule. In yet another embodiment, the expression vector comprises: a) a transcription initiation region; b) a transcription termination region; c) an intron; and d) a nucleic acid sequence encoding at least one siNA molecule, wherein the sequence is operably linked to the initiation region, the intron and the termination region in a manner which allows expression and/or delivery of the nucleic acid molecule.

[0496] In another embodiment, the expression vector comprises: a) a transcription initiation region; b) a transcription termination region; c) an intron; d) an open reading frame; and e) a nucleic acid sequence encoding at least one strand of a siNA molecule, wherein the sequence is operably linked to the 3′-end of the open reading frame and wherein the sequence is operably linked to the initiation region, the intron, the open reading frame and the termination region in a manner which allows expression and/or delivery of the siNA molecule.

Influenza Virus Biology and Biochemistry

[0497] Three types of influenza viruses (A, B, and C) are distinguishable by antigenic reactivities of their internal antigens. There are other biological properties which characterize the three types: (a) Influenza A viruses have been isolated from many animal species in addition to humans while influenza B and C viruses are mainly human pathogens; (b) the surface glycoproteins of influenza A exhibit much greater variability than their homologues in the B and C viruses; (c) morphological and molecular features of C viruses are distinctive from those of the A and B viruses.

[0498] The morphological characteristics of influenza viruses are a genetic trait, but spherical morphology dominates after passage in chicken embryos or tissue culture. The genes that specify morphology are uncertain, but segregate separately from the hemagglutinin (HA) and neuraminidase (NA) envelope surface proteins. Within the lipid envelope lies the matrix protein (M), which plays a structural function. Within the matrix shell are eight single-stranded RNA molecules of negative sense associated with the nucleoprotein (NP) and three large proteins (PB1, PB2, and PA) required for RNA replication and transcription. At least three viral encoded nonstructural proteins (NS1, NS2 and M2) are formed in infected cells.

[0499] The organization of the eight RNA segments within the virion has not been completely resolved. Although each segment may exist in vivo as a nucleoprotein complex, electron microscopic studies have shown that the internal component from disrupted virions is a single large helix. The virion particle does not seem to be a tight protective coat around the RNA because ribonuclease digestion of virion reduces the RNA segments to nucleotide. Genomic RNAs of influenza virus are held in a circular conformation in a virion and in infected cells by a terminal panhandle that plays a role in viral replication. The panhandle structure is present in all segments of genomic RNA.

[0500] The HA accounts for 25% of viral protein and is distributed evenly on the virion surface. It is responsible for attachment of the virus to cells and penetration of virus into cells early in infection. The HA monomer is encoded by the fourth largest RNA segment and is synthesized as a single polypeptide chain which undergoes post-translational cleavage at a minimum of three sites. Cleavage of the HA polypeptide into HA1 and HA2 is necessary for virus particle infectivity. A sequence of 25-32 hydrophobic amino acids at the C-terminus of HA2 serves to anchor HA in the virus membrane. In spite of functional domain conservation in HA, the amino acid or nucleotide sequences of the proteins vary considerably between isolates of different subtypes.

[0501] The neuraminidase (NA) is the second subtype-specific glycoprotein of the virion and is composed of a single polypeptide chain. The NA is not evenly distributed on the surface of the virion but is found in patches. NA appears to be essential for the replication of type A and B influenza viruses by functioning as a sialidase, allowing for the release of progeny virions from infected cells. No post-translational cleavage of the NA polypeptide occurs. The nucleotide sequences of different NA gene isolates varies considerably between subtypes (e.g., A and B virus amino acid homology is 26-29%). The NA gene of influenza B encodes two proteins, NA and NB. The NA is thought to be structurally and functionally similar to the type A NA. The NB protein is a glycoprotein with potential sialidase activity which is 100 amino acids in length.

[0502] The nucleoprotein (NP) is one of the type-specific antigens of influenza viruses that distinguishes the influenza type A, B, and C viruses. The NP is a multifunctional protein having a structural role in forming the nucleoprotein complex and a putative role in transcription and replication. Genetic analysis of a large number of influenza strains has revealed that the NP genes can be placed into one of five different groupings. All avian strains fall within two groups, equine strains fall within two more groups and all human and swine strains form the final group. The restriction of certain species strains to these groups suggests that the NP gene may influence species-specificity or host range.

[0503] RNA segment 7 encodes the two M proteins (M1 and M2). The mRNA encoding M1 is co-linear with RNA segment 7, whereas M2 is encoded by a spliced mRNA. The two proteins share the same initiation codon for protein synthesis and the eight amino acid residues before the 5′ splice junction of the M2 mRNA. The remaining 88 amino acids of M2 are encoded in the +1 reading frame from nucleotides 740-1104. This organization of RNA segment 7 is present in all influenza A and B viruses sequenced.

[0504] The M1 protein is a virion structural protein that is intimately associated with the lipid bilayer in close proximity to both glycoproteins and the ribonucleoprotein complex. It is also believed to have a role in the down-regulation of the virion transcriptase activity. Passively transferred monoclonal antibodies to this protein do not confer resistance to infection by influenza virus.

[0505] The M2 protein of influenza A is an integral membrane protein that is expressed at the surface of infected cells. The M2 protein may be a virion-associated protein with between 14 and 68 molecules per virion. Amantadine-resistant mutants of influenza virus contain mutations in the transmembrane domain of the M2 protein. Because amantadine alters viral penetration into cells, it is likely that M2 is in the virion.

[0506] Comparison of RNA segment 7 sequences of the H3N2 (Udom) and H1N1 (PR8) strains show that the M protein coding sequences of these viruses (isolated 38 years apart) are highly conserved. Lamb, “The genes and proteins of influenza viruses,” in Krug. ed. The Influenza Viruses, NY, Plenum. 1989. Comparison of 230 nucleotides of RNA segment 7 from 5 human H1N1, H2N2 and H3N2 strains isolated over a 43 year period suggests that the same segment 7 was retained throughout the antigenic shifts of HA and NA. Hall and Air, 1981, J. Virol., 38(1) 1981.

[0507] Studies have shown that RNA segment 8 of influenza A and B encodes two nonstructural proteins which are translated from separate mRNAs. NS1 and NS2 polypeptides of influenza A share 9 amino acids at their N termini, after which the NS2 mRNA has a 423 nucleotide deletion; then, the NS2 mRNA rejoins the NS1 3′ region in the +1 reading frame. NS1 is synthesized in large amounts early in infection. NS2 is made only late in infection. Both proteins share a nuclear localization signal and can be found in the nuclei of infected cells. Large deletions occur in the carboxyl termini of the NS 1 proteins of field isolates from humans or birds, which indicates that a high degree of variation can be tolerated in this polypeptide without affecting its function.

[0508] The three largest proteins of the virion (PB1, PB2 and PA) are found associated with NP and virion RNA and carry the polymerase activity which transcribes invading viral RNA. The PB1 and PB2 proteins form a complex when expressed in the absence of other virion proteins or RNA and are probably required for complementary RNA synthesis. PA and NP are required for virion RNA synthesis. The PB1 gene of influenza B virus shows 61% homology with that of the influenza A virus.

[0509] Influenza virus produces an acute febrile infection of the respiratory tract characterized by abrupt onset prominent myalgias, headache and cough. Pneumonia is the most frequent complication; it may be primary viral (due to invasion of lung parenchyma), secondary bacterial, or mixed viral and bacterial pneumonia. It may be severe and progressive or mild and segmental. Other complications which occur with less frequency include Reye's syndrome, myocarditis, pericarditis, myositis, encephalopathy and transverse myelitis. It has been estimated that the direct costs of influenza exceed $1 billion per year and may reach $3 to $5 billion. Total costs may be two to three times higher.

[0510] Two types of vaccines are available for influenza. The “split” vaccines are chemically treated to reduce pyrogenic components and are the only type given to children under 13 years of age. The “whole” vaccine is generally given to adults. Protective antibody titers are present in more than 90% of normal subjects after vaccination with influenza A antigens, but there is much less response to influenza B antigens. Additionally, elderly subjects and patients with renal failures or immunosuppression are at much greater risk to infection even with vaccination. The 70-80% efficacy of the vaccine is only observed when strain matches are good. Lower efficacy is observed when the match is not close, and when patients are immunocompromised, or in institutional situations in which virus is readily transmitted.

[0511] Two drugs, amantadine and rimantadine, are as effective as influenza vaccine in preventing influenza A infections. Unfortunately, they are not as active against influenza B, which is responsible for 20% of all influenza epidemics and in a given year may be the only virus circulating. Both drugs appear to impair the uncoating of viral RNA in infected cells by blocking the acidification process required to open the viral particles.

[0512] Resistance to amantadine and rimantadine is easily produced in the laboratory by serial passage of strains of influenza A virus in low concentrations of the drug, and such isolates are cross-resistant to both drugs. Drug resistant strains of influenza virus are able to initiate infection of cells as effectively as their wild type progenitors. Resistance is associated with the presence of point mutations in the RNA sequence coding for the M2 protein. This occurs most frequently at amino acid 31, but may also occur at positions 27 to 34, which encompass the transmembrane domain of the protein. It has been hypothesized that M2 protein may act as an ion channel to facilitate the acidification of the virus particle, and that amantadine and rimantadine block this viral-envelope pore.

[0513] Two drugs, oseltamivir phosphate (Tamiflu™) and zanamivir (Relenza™) both neuraminidase inhibitors, have recently been approved for the treatment of influenza virus infection. While neuraminidase inhibitors appear to be safe and effective for the prevention and treatment of influenza, the neuraminidase and hemagglutinin genes of the influenza virus are prone to antigenic drift, leading to the potential for viral resistance and loss of efficacy from these treatments. Resistant strains of influenza virus to neuraminidase inhibitors have been isolated (Penn et al., 1996, Int. Congr. Ser., 1123, 735-740; Waghorn and Goa, 1998, Drugs, 55(5), 721-725).

[0514] Highly pathogenic avian influenza viruses of the H5N1 subtype are widespread and have become endemic in poultry resevoirs in southern and southeastern Asia. An unprecedented epizootic was caused by these viruses in eight countries in the winter of 2003 to 2004. This fact along with more frequent human cases of the infection with unusually high mortality rates seen in Vietnam and Thailand raises concern that these H5N1 events may lead to a new influenza A virus pandemic. Avian influenza (influenza A [H5N1]) appears to have the potential to be a pandemic flu if human to human transmission takes place. Most influenza viruses occur in birds, particularly the aquatic waterfowl, such as ducks, that are their natural reservoir. Only a few types of influenza virus have circulated widely in humans, generally strains having H1N1, H2N2, or H3N2 subtypes. “Bird flu” refers colloquially to both influenza in birds and to instances when these avian viruses jump the species barrier and result in human disease. The influenza A genome encodes two major surface glycoproteins, the hemagglutinin (H) and neuraminidase (N) proteins. The subtypes of these surface glycoproteins are antigenetically distinct, having 16 H subtypes and 9 N subtypes. All of these subtypes can be found in birds, but only H1, H2, and H3 have caused pandemics and epidemics in people. Influenza viruses are constantly evolving into new antigenic variants, which accounts for vulnerability and the need for annual vaccination and antiviral agents that are effective against many or all strains.

[0515] The use of small interfering nucleic acid molecules targeting influenza genes (e.g., conserved sequences in the influenza genome) and cellular/host gene targets associated with the influenza life cycle therefore provides a class of novel therapeutic agents that can be used in the treatment and diagnosis of influenza infection, pneumonia, respiratory failure, Reye syndrome, or any other disease or condition that responds to modulation (e.g., inhibition) of influenza genes in a subject or organism.

### EXAMPLES

[0516] The following are non-limiting examples showing the selection, isolation, synthesis and activity of nucleic acids of the instant invention.

### Example 1

### Tandem Synthesis of siNA Constructs

[0517] Exemplary siNA molecules of the invention are synthesized in tandem using a cleavable linker, for example, a succinyl-based linker. Tandem synthesis as described herein is followed by a one-step purification process that provides RNAi molecules in high yield. This approach is highly amenable to siNA synthesis in support of high throughput RNAi screening, and can be readily adapted to multi-column or multi-well synthesis platforms.

[0518] After completing a tandem synthesis of a siNA oligo and its complement in which the 5′-terminal dimethoxytrityl (5′-O-DMT) group remains intact (trityl on synthesis), the oligonucleotides are deprotected as described above. Following deprotection, the siNA sequence strands are allowed to spontaneously hybridize. This hybridization yields a duplex in which one strand has retained the 5′-O-DMT group while the complementary strand comprises a terminal 5′-hydroxyl. The newly formed duplex behaves as a single molecule during routine solid-phase extraction purification (Trityl-On purification) even though only one molecule has a dimethoxytrityl group. Because the strands form a stable duplex, this dimethoxytrityl group (or an equivalent group, such as other trityl groups or other hydrophobic moieties) is all that is required to purify the pair of oligos, for example, by using a C18 cartridge.

[0519] Standard phosphoramidite synthesis chemistry is used up to the point of introducing a tandem linker, such as an inverted deoxy abasic succinate or glyceryl succinate linker (see FIG. 1) or an equivalent cleavable linker. A non-limiting example of linker coupling conditions that can be used includes a hindered base such as diisopropylethylamine (DIPA) and/or DMAP in the presence of an activator reagent such as Bromotripyrrolidinophosphoniumhexaflurorophosphate (PyBrOP). After the linker is coupled, standard synthesis chemistry is utilized to complete synthesis of the second sequence leaving the terminal the 5′-O-DMT intact. Following synthesis, the resulting oligonucleotide is deprotected according to the procedures described herein and quenched with a suitable buffer, for example with 50 mM NaOAc or 1.5M NH₄H₂CO₃.

[0520] Purification of the siNA duplex can be readily accomplished using solid phase extraction, for example, using a Waters C18 SepPak 1 g cartridge conditioned with 1 column volume (CV) of acetonitrile, 2 CV H20, and 2 CV 50 mM NaOAc. The sample is loaded and then washed with 1 CV H20 or 50 mM NaOAc. Failure sequences are eluted with 1 CV 14% ACN (Aqueous with 50 mM NaOAc and 50 mM NaCl). The column is then washed, for example with 1 CV H20 followed by on-column detritylation, for example by passing 1 CV of 1% aqueous trifluoroacetic acid (TFA) over the column, then adding a second CV of 1% aqueous TFA to the column and allowing to stand for approximately 10 minutes. The remaining TFA solution is removed and the column washed with H20 followed by 1 CV 1M NaCl and additional H20. The siNA duplex product is then eluted, for example, using 1 CV 20% aqueous CAN.

[0521] FIG. 2 provides an example of MALDI-TOF mass spectrometry analysis of a purified siNA construct in which each peak corresponds to the calculated mass of an individual siNA strand of the siNA duplex. The same purified siNA provides three peaks when analyzed by capillary gel electrophoresis (CGE), one peak presumably corresponding to the duplex siNA, and two peaks presumably corresponding to the separate siNA sequence strands. Ion exchange HPLC analysis of the same siNA contract only shows a single peak. Testing of the purified siNA construct using a luciferase reporter assay described below demonstrated the same RNAi activity compared to siNA constructs generated from separately synthesized oligonucleotide sequence strands.

### Example 2

### Identification of Potential siNA Target Sites in any RNA Sequence

[0522] The sequence of an RNA target of interest, such as a viral or human mRNA transcript, is screened for target sites, for example by using a computer folding algorithm. In a non-limiting example, the sequence of a gene or RNA gene transcript derived from a database, such as Genbank, is used to generate siNA targets having complementarity to the target. Such sequences can be obtained from a database, or can be determined experimentally as known in the art. Target sites that are known, for example, those target sites determined to be effective target sites based on studies with other nucleic acid molecules, for example ribozymes or antisense, or those targets known to be associated with a disease, trait, or condition such as those sites containing mutations or deletions, can be used to design siNA molecules targeting those sites. Various parameters can be used to determine which sites are the most suitable target sites within the target RNA sequence. These parameters include but are not limited to secondary or tertiary RNA structure, the nucleotide base composition of the target sequence, the degree of homology between various regions of the target sequence, or the relative position of the target sequence within the RNA transcript. Based on these determinations, any number of target sites within the RNA transcript can be chosen to screen siNA molecules for efficacy, for example by using in vitro RNA cleavage assays, cell culture, or animal models. In a non-limiting example, anywhere from 1 to 1000 target sites are chosen within the transcript based on the size of the siNA construct to be used. High throughput screening assays can be developed for screening siNA molecules using methods known in the art, such as with multi-well or multi-plate assays to determine efficient reduction in target gene expression.

### Example 3

### Selection of siNA Molecule Target Sites in a RNA

[0523] The following non-limiting steps can be used to carry out the selection of siNAs targeting a given gene sequence or transcript.

[0524] 1. The target sequence is parsed in silico into a list of all fragments or subsequences of a particular length, for example 23 nucleotide fragments, contained within the target sequence. This step is typically carried out using a custom Perl script, but commercial sequence analysis programs such as Oligo, MacVector, or the GCG Wisconsin Package can be employed as well.

[0525] 2. In some instances the siNAs correspond to more than one target sequence; such would be the case for example in targeting different transcripts of the same gene, targeting different transcripts of more than one gene, or for targeting both the human gene and an animal homolog. In this case, a subsequence list of a particular length is generated for each of the targets, and then the lists are compared to find matching sequences in each list. The subsequences are then ranked according to the number of target sequences that contain the given subsequence; the goal is to find subsequences that are present in most or all of the target sequences. Alternately, the ranking can identify subsequences that are unique to a target sequence, such as a mutant target sequence. Such an approach would enable the use of siNA to target specifically the mutant sequence and not effect the expression of the normal sequence.

[0526] 3. In some instances the siNA subsequences are absent in one or more sequences while present in the desired target sequence; such would be the case if the siNA targets a gene with a paralogous family member that is to remain untargeted. As in case 2 above, a subsequence list of a particular length is generated for each of the targets, and then the lists are compared to find sequences that are present in the target gene but are absent in the untargeted paralog.

[0527] 4. The ranked siNA subsequences can be further analyzed and ranked according to GC content. A preference can be given to sites containing 30-70% GC, with a further preference to sites containing 40-60% GC.

[0528] 5. The ranked siNA subsequences can be further analyzed and ranked according to self-folding and internal hairpins. Weaker internal folds are preferred; strong hairpin structures are to be avoided.

[0529] 6. The ranked siNA subsequences can be further analyzed and ranked according to whether they have runs of GGG or CCC in the sequence. GGG (or even more Gs) in either strand can make oligonucleotide synthesis problematic and can potentially interfere with RNAi activity, so it is avoided whenever better sequences are available. CCC is searched in the target strand because that will place GGG in the antisense strand.

[0530] 7. The ranked siNA subsequences can be further analyzed and ranked according to whether they have the dinucleotide UU (uridine dinucleotide) on the 3′-end of the sequence, and/or AA on the 5′-end of the sequence (to yield 3′ UU on the antisense sequence). These sequences allow one to design siNA molecules with terminal TT thymidine dinucleotides.

[0531] 8. Four or five target sites are chosen from the ranked list of subsequences as described above. For example, in subsequences having 23 nucleotides, the right 21 nucleotides of each chosen 23-mer subsequence are then designed and synthesized for the upper (sense) strand of the siNA duplex, while the reverse complement of the left 21 nucleotides of each chosen 23-mer subsequence are then designed and synthesized for the lower (antisense) strand of the siNA duplex (see Table II). If terminal TT residues are desired for the sequence (as described in paragraph 7), then the two 3′ terminal nucleotides of both the sense and antisense strands are replaced by TT prior to synthesizing the oligos.

[0532] 9. The siNA molecules are screened in an in vitro, cell culture or animal model system to identify the most active siNA molecule or the most preferred target site within the target RNA sequence.

[0533] 10. Other design considerations can be used when selecting target nucleic acid sequences, see, for example, Reynolds et al., 2004, Nature Biotechnology Advanced Online Publication, 1Feb. 2004, doi:10.1038/nbt936 and Ui-Tei et al., 2004, Nucleic Acids Research, 32, doi: l0.1093/nar/gkh247.

[0534] In an alternate approach, a pool of siNA constructs specific to a target sequence is used to screen for target sites in cells expressing target RNA, such as cultured Jurkat, HeLa, A549 or 293T cells. The general strategy used in this approach is shown in FIG. 9. Cells expressing the target RNA are transfected with the pool of siNA constructs and cells that demonstrate a phenotype associated with target inhibition are sorted. The pool of siNA constructs can be expressed from transcription cassettes inserted into appropriate vectors (see for example FIG. 7 and FIG. 8). The siNA from cells demonstrating a positive phenotypic change (e.g., decreased proliferation, decreased target mRNA levels or decreased target protein expression), are sequenced to determine the most suitable target site(s) within the target target RNA sequence.

### Example 4

### siNA Design

[0535] Influenza virus sequences were retrieved from the NCBI public database and were aligned using an in-house script as is generally known in the art. The particular sequence that showed the highest degree of homology was used as a reference sequence (see reference sequences for each gene in Table II). Target sequences having greater than 80% homology were identified across all sequences analyzed (see Table I for Genbank accession numbers of the sequences analyzed and Table II for the resulting target sequences). These highly conserved siRNAs were ranked using the above parameters to find the top eight sequences for chemical modification (see Table III). An additional eight siNAs with highest conservation that would target the plus strand of the influenza genome where chosen as well. Varying the length of the siNA molecules can be chosen to optimize activity. Generally, a sufficient number of complementary nucleotide bases are chosen to bind to, or otherwise interact with, the target RNA, but the degree of complementarity can be modulated to accommodate siNA duplexes or varying length or base composition. By using such methodologies, siNA molecules can be designed to target sites within any known RNA sequence, for example those RNA sequences corresponding to the any gene transcript.

[0536] Chemically modified siNA constructs are designed to provide nuclease stability for systemic administration in vivo and/or improved pharmacokinetic, localization, and delivery properties while preserving the ability to mediate RNAi activity. Chemical modifications as described herein are introduced synthetically using synthetic methods described herein and those generally known in the art. The synthetic siNA constructs are then assayed for nuclease stability in serum and/or cellular/tissue extracts (e.g. liver extracts). The synthetic siNA constructs are also tested in parallel for RNAi activity using an appropriate assay, such as a luciferase reporter assay as described herein or another suitable assay that can quantity RNAi activity. Synthetic siNA constructs that possess both nuclease stability and RNAi activity can be further modified and re-evaluated in stability and activity assays. The chemical modifications of the stabilized active siNA constructs can then be applied to any siNA sequence targeting any chosen RNA and used, for example, in target screening assays to pick lead siNA compounds for therapeutic development (see for example FIG. 11).

### Example 5

### Chemical Synthesis and Purification of siNA

[0537] NA molecules can be designed to interact with various sites in the RNA message, for example, target sequences within the RNA sequences described herein. The sequence of one strand of the siNA molecule(s) is complementary to the target site sequences described above. The siNA molecules can be chemically synthesized using methods described herein. Inactive siNA molecules that are used as control sequences can be synthesized by scrambling the sequence of the siNA molecules such that it is not complementary to the target sequence. Generally, siNA constructs can by synthesized using solid phase oligonucleotide synthesis methods as described herein (see for example Usman et al., U.S. Pat. Nos. 5,804,683; 5,831,071; 5,998,203; 6,117,657; 6,353,098; 6,362,323; 6,437,117; 6,469,158; Scaringe et al., U.S. Pat. Nos. 6,111,086; 6,008,400; 6,111,086 all incorporated by reference herein in their entirety).

[0538] In a non-limiting example, RNA oligonucleotides are synthesized in a stepwise fashion using the phosphoramidite chemistry as is known in the art. Standard phosphoramidite chemistry involves the use of nucleosides comprising any of 5 ′-O-dimethoxytrityl, 2′-O-tert-butyldimethylsilyl, 3′-O-2-Cyanoethyl N,N-diisopropylphos-phoroamidite groups, and exocyclic amine protecting groups (e.g. N6-benzoyl adenosine, N4 acetyl cytidine, and N2-isobutyryl guanosine). Alternately, 2′-O-Silyl Ethers can be used in conjunction with acid-labile 2′-O-orthoester protecting groups in the synthesis of RNA as described by Scaringe supra. Differing 2′ chemistries can require different protecting groups, for example 2′-deoxy-2′-amino nucleosides can utilize N-phthaloyl protection as described by Usman et al., U.S. Pat. No. 5,631,360, incorporated by reference herein in its entirety).

[0539] During solid phase synthesis, each nucleotide is added sequentially (3′- to 5′-direction) to the solid support-bound oligonucleotide. The first nucleoside at the 3 ′-end of the chain is covalently attached to a solid support (e.g., controlled pore glass or polystyrene) using various linkers. The nucleotide precursor, a ribonucleoside phosphoramidite, and activator are combined resulting in the coupling of the second nucleoside phosphoramidite onto the 5′-end of the first nucleoside. The support is then washed and any unreacted 5′-hydroxyl groups are capped with a capping reagent such as acetic anhydride to yield inactive 5′-acetyl moieties. The trivalent phosphorus linkage is then oxidized to a more stable phosphate linkage. At the end of the nucleotide addition cycle, the 5′-O-protecting group is cleaved under suitable conditions (e.g., acidic conditions for trityl-based groups and Fluoride for silyl-based groups). The cycle is repeated for each subsequent nucleotide.

[0540] Modification of synthesis conditions can be used to optimize coupling efficiency, for example by using differing coupling times, differing reagent/phosphoramidite concentrations, differing contact times, differing solid supports and solid support linker chemistries depending on the particular chemical composition of the siNA to be synthesized. Deprotection and purification of the siNA can be performed as is generally described in Usman et al., U.S. Pat. No. 5,831,071, U.S. Pat. No. 6,353,098, U.S. Pat. No. 6,437,117, and Bellon et al., U.S. Pat. No. 6,054,576, U.S. Pat. No. 6,162,909, U.S. Pat. No. 6,303,773, or Scaringe supra, incorporated by reference herein in their entireties. Additionally, deprotection conditions can be modified to provide the best possible yield and purity of siNA constructs. For example, applicant has observed that oligonucleotides comprising 2′-deoxy-2′-fluoro nucleotides can degrade under inappropriate deprotection conditions. Such oligonucleotides are deprotected using aqueous methylamine at about 35° C. for 30 minutes. If the 2′-deoxy-2′-fluoro containing oligonucleotide also comprises ribonucleotides, after deprotection with aqueous methylamine at about 35° C. for 30 minutes, TEA-HF is added and the reaction maintained at about 65° C. for an additional 15 minutes.

### Example 6

### RNAi In Vitro Assay to Assess siNA Activity

[0541] An in vitro assay that recapitulates RNAi in a cell-free system is used to evaluate siNA constructs targeting influenza RNA targets. The assay comprises the system described by Tuschl et al., 1999, Genes and Development, 13, 3191-3197 and Zamore et al., 2000, Cell, 101, 25-33 adapted for use with a target RNA. A Drosophila extract derived from syncytial blastoderm is used to reconstitute RNAi activity in vitro. Target RNA is generated via in vitro transcription from an appropriate target expressing plasmid using T7 RNA polymerase or via chemical synthesis as described herein. Sense and antisense siNA strands (for example 20 uM each) are annealed by incubation in buffer (such as 100 mM potassium acetate, 30 mM HEPES-KOH, pH 7.4, 2 mM magnesium acetate) for 1 minute at 90° C. followed by 1 hour at 37° C., then diluted in lysis buffer (for example 100 mM potassium acetate, 30 mM HEPES-KOH at pH 7.4, 2mM magnesium acetate). Annealing can be monitored by gel electrophoresis on an agarose gel in TBE buffer and stained with ethidium bromide. The Drosophila lysate is prepared using zero to two-hour-old embryos from Oregon R flies collected on yeasted molasses agar that are dechorionated and lysed. The lysate is centrifuged and the supernatant isolated. The assay comprises a reaction mixture containing 50% lysate [vol/vol], RNA (10-50 pM final concentration), and 10% [vol/vol] lysis buffer containing siNA (10 nM final concentration). The reaction mixture also contains 10 mM creatine phosphate, 10 ug/ml creatine phosphokinase, 100 um GTP, 100 uM UTP, 100 uM CTP, 500 uM ATP, 5 mM DTT, 0.1 U/uL RNasin (Promega), and 100 uM of each amino acid. The final concentration of potassium acetate is adjusted to 100 mM. The reactions are pre-assembled on ice and preincubated at 25° C. for 10 minutes before adding RNA, then incubated at 25° C. for an additional 60 minutes. Reactions are quenched with 4 volumes of 1.25×Passive Lysis Buffer (Promega). Target RNA cleavage is assayed by RT-PCR analysis or other methods known in the art and are compared to control reactions in which siNA is omitted from the reaction.

[0542] Alternately, internally-labeled target RNA for the assay is prepared by in vitro transcription in the presence of [alpha-³²p] CTP, passed over a G50 Sephadex column by spin chromatography and used as target RNA without further purification. Optionally, target RNA is 5′-³²P-end labeled using T4 polynucleotide kinase enzyme. Assays are performed as described above and target RNA and the specific RNA cleavage products generated by RNAi are visualized on an autoradiograph of a gel. The percentage of cleavage is determined by PHOSPHOR IMAGER® (autoradiography) quantitation of bands representing intact control RNA or RNA from control reactions without siNA and the cleavage products generated by the assay.

[0543] In one embodiment, this assay is used to determine target sites in the influenza RNA target for siNA mediated RNAi cleavage, wherein a plurality of siNA constructs are screened for RNAi mediated cleavage of the influenza RNA target, for example, by analyzing the assay reaction by electrophoresis of labeled target RNA, or by northern blotting, as well as by other methodology well known in the art.

### Example 7

### Nucleic Acid Inhibition of Target RNA In Vivo

[0544] siNA molecules targeted to the influenza target RNA are designed and synthesized as described above. These nucleic acid molecules can be tested for efficacy in vitro, for example, using the procedure described by Ge et al., 2003, PNAS USA., 100, 2718-2723. This reference describes evaluation of siRNAs against influenza H1N1 nucleocapsid (NP) or RNA transcriptase PA gene sequences in MDCK cells. The MDCK cells are pretreated with siNAs and are subsequently infected with either PR8 or WSN influenza virus. Virus titers are assayed to determine the extent of inhibition of active siNA compared to appropriate controls (e.g., siRNA targeting GFP). In addition, transfection with siNA can take place after inoculation of cells with influenza virus and viral titers are subsequently determined, such as via plaque assay or RT PCR.

[0545] Additional cell culture models that can be used to evaluate influenza virus inhibitors are described by Tisdale et al., 1993, Antiviral Chem. Chemother., 4(5), 281-7; Von Itzstein et al., 1993, Nature, 363(6428), 418-423; Mena et al., 1999, J Virol., 73(2), 1186-1194; Gubareva et al., 1995, Virology, 212(2), 323-30; Hayden et al., 1994, Antiviral Res., 25(2), 123-31; and Nunes-Correia etal., 1999, Biochemistry, 38(3), 109-1101.

### Example 8

### Models Useful to Evaluate the Production of Influenza Virus In Vivo

[0546] Evaluating the efficacy of siNA molecules of the invention in animal models is an important prerequisite to human clinical trials. Various animal model systems have been developed which can be used to evaluate the efficacy of nucleic acid molecules of the instant invention. Gubareva et al., 1995, Virology, 212(2), 323-30, describe an avian model that can be used to study the inhibition of all nine subtypes of avian influenza A neuraminidase. Friedman et al., 1995, Mol. Approaches Control Infect. Dis., [Annu. Meet.], 12^{th}, 85-9, describe a ferret model for evaluation of DNA vaccines against influenza in which vaccination using hemagglutinin DNAcan reduce nasal virus shedding and can provide accelerated clearance of influenza virus. Additionally, animal models used in the development of neuraminidase inhibitors are reviewed in Varghese, 1999, Drug Dev. Res., 46(3/4), 176-196; Calfee and Hayden, 1998, Drugs, 56(4), 537-553; and Colman, 1995, Pure Appl. Chem., 67(10), 1683-8.

[0547] To evaluate siNA molecules of the invention for efficacy in inhibiting influenza virus activity in vivo, the siNAs are tested for inhibition of influenza virus production in developing chicken embryos, a widely used model of influenza virus infection as described in Ge et al., 2003, PNAS USA., 100, 2718-2723. Briefly, either virus alone or virus and siNA are transfected by injection with a transfection agent into the allantoic cavity of ten day old embryonated chicken eggs. Allantoic fluids are collected at a later time (e.g., 17-24 hours post transfection) for measurement of virus titers. In addition, control siNA sequences can be utilized that target, for example GFP.

### Example 9

### Indications

[0548] Particular conditions and disease states that can be associated with influenza virus RNA expression modulation include but are not limited to influenza virus infection and associated primary and/or secondary infections (for example, pneumonia), Reye's syndrome, myocarditis, pericarditis, myositis, encephalopathy and transverse myelitis and any other diseases or conditions that are related to or will respond to the levels of influenza virus RNA in a cell or tissue, alone or in combination with other therapies. The present body of knowledge in influenza virus RNA research indicates the need for methods to assay influenza virus RNA activity and for compounds that can regulate influenza virus RNA expression for research, diagnostic, and therapeutic use.

[0549] The nucleic acid (e.g, siNA) molecules of the present invention may also be administered to a patient in combination with other therapeutic compounds to increase the overall therapeutic effect. The use of multiple compounds to treat an indication may increase the beneficial effects while reducing the presence of side effects. Pharmacuetical agents such as amantadine, rimantadine, oseltamivir phosphate (Tamiflu), zanamivir (Relenza), and vaccinations are non-limiting examples of compounds and/or methods that can be combined with or used in conjunction with the nucleic acid molecules (e.g. siNA molecules) of the instant invention. Those skilled in the art will recognize that other drug compounds and therapies can be similarly and readily combined with the nucleic acid molecules of the instant invention and are, therefore, within the scope of the instant invention.

### Example 10

### Multifunctional siNA Inhibition of Target RNA Expression

Multifunctional siNA Design

[0550] Once target sites have been identified for multifunctional siNA constructs, each strand of the siNA is designed with a complementary region of length, for example, of about 18 to about 28 nucleotides, that is complementary to a different target nucleic acid sequence. Each complementary region is designed with an adjacent flanking region of about 4 to about 22 nucleotides that is not complementary to the target sequence, but which comprises complementarity to the complementary region of the other sequence (see for example FIG. 16). Hairpin constructs can likewise be designed (see for example FIG. 17). Identification of complementary, palindrome or repeat sequences that are shared between the different target nucleic acid sequences can be used to shorten the overall length of the multifunctional siNA constructs (see for example FIGS. 18 and 19). 105361 In a non-limiting example, three additional categories of additional multifunctional siNA designs are presented that allow a single siNA molecule to silence multiple targets. The first method utilizes linkers to join siNAs (or multiunctional siNAs) in a direct manner. This can allow the most potent siNAs to be joined without creating a long, continuous stretch of RNA that has potential to trigger an interferon response. The second method is a dendrimeric extension of the overlapping or the linked multifunctional design; or alternatively the organization of siNA in a supramolecular format. The third method uses helix lengths greater than 30 base pairs. Processing of these siNAs by Dicer will reveal new, active 5′ antisense ends. Therefore, the long siNAs can target the sites defined by the original 5′ ends and those defined by the new ends that are created by Dicer processing. When used in combination with traditional multifunctional siNAs (where the sense and antisense strands each define a target) the approach can be used for example to target 4 or more sites.

I. Tethered Bifunctional siNAs

[0551] The basic idea is a novel approach to the design of multifunctional siNAs in which two antisense siNA strands are annealed to a single sense strand. The sense strand oligonucleotide contains a linker (e.g., non-nulcoetide linker as described herein) and two segments that anneal to the antisense siNA strands (see FIG. 22). The linkers can also optionally comprise nucleotide-based linkers. Several potential advantages and variations to this approach include, but are not limited to:
[0552] 1. The two antisense siNAs are independent. Therefore, the choice of target sites is not constrained by a requirement for sequence conservation between two sites. Any two highly active siNAs can be combined to form a multifunctional siNA.
[0553] 2. When used in combination with target sites having homology, siNAs that target a sequence present in two genes (e.g., different isoforms), the design can be used to target more than two sites. A single multifunctional siNA can be for example, used to target RNA of two different target RNAs.
[0554] 3. Multifunctional siNAs that use both the sense and antisense strands to target a gene can also be incorporated into a tethered multifuctional design. This leaves open the possibility of targeting 6 or more sites with a single complex.
[0555] 4. It can be possible to anneal more than two antisense strand siNAs to a single tethered sense strand.
[0556] 5. The design avoids long continuous stretches of dsRNA. Therefore, it is less likely to initiate an interferon response.
[0557] 6. The linker (or modifications attached to it, such as conjugates described herein) can improve the pharmacokinetic properties of the complex or improve its incorporation into liposomes. Modifications introduced to the linker should not impact siNA activity to the same extent that they would if directly attached to the siNA (see for example FIGS. 27 and 28).
[0558] 7. The sense strand can extend beyond the annealed antisense strands to provide additional sites for the attachment of conjugates.
[0559] 8. The polarity of the complex can be switched such that both of the antisense 3′ ends are adjacent to the linker and the 5′ ends are distal to the linker or combination thereof.
   Dendrimer and Supramolecular siNAs

[0560] In the dendrimer siNA approach, the synthesis of siNA is initiated by first synthesizing the dendrimer template followed by attaching various functional siNAs. Various constructs are depicted in FIG. 23. The number of functional siNAs that can be attached is only limited by the dimensions of the dendrimer used.

Supramolecular Approach to Multifunctional siNA

[0561] The supramolecular format simplifies the challenges of dendrimer synthesis. In this format, the siNA strands are synthesized by standard RNA chemistry, followed by annealing of various complementary strands. The individual strand synthesis contains an antisense sense sequence of one siNA at the 5′-end followed by a nucleic acid or synthetic linker, such as hexaethyleneglyol, which in turn is followed by sense strand of another siNA in 5′ to 3′ direction. Thus, the synthesis of siNA strands can be carried out in a standard 3′ to 5′ direction. Representative examples of trifunctional and tetrafunctional siNAs are depicted in FIG. 24. Based on a similar principle, higher functionality siNA constucts can be designed as long as efficient annealing of various strands is achieved.

Dicer Enabled Multifunctional siNA

[0562] Using bioinformatic analysis of multiple targets, stretches of identical sequences shared between differeing target sequences can be identified ranging from about two to about fourteen nucleotides in length. These identical regions can be designed into extended siNA helixes (e.g., >30 base pairs) such that the processing by Dicer reveals a secondary functional 5′-antisense site (see for example FIG. 25). For example, when the first 17 nucleotides of a siNA antisense strand (e.g., 21 nucleotide strands in a duplex with 3′-TT overhangs) are complementary to a target RNA, robust silencing was observed at 25 nM. 80% silencing was observed with only 16 nucleotide complementarity in the same format.

[0563] Incorporation of this property into the designs of siNAs of about 30 to 40 or more base pairs results in additional multifunctional siNA constructs. The example in FIG. 25 illustrates how a 30 base-pair duplex can target three distinct sequences after processing by Dicer-RNaseIII; these sequences can be on the same mRNA or separate RNAs, such as viral and host factor messages, or multiple points along a given pathway (e.g., inflammatory cascades). Furthermore, a 40 base-pair duplex can combine a bifunctional design in tandem, to provide a single duplex targeting four target sequences. An even more extensive approach can include use of homologous sequences to enable five or six targets silenced for one multifunctional duplex. The example in FIG. 25 demonstrates how this can be achieved. A 30 base pair duplex is cleaved by Dicer into 22 and 8 base pair products from either end (8 b.p. fragments not shown). For ease of presentation the overhangs generated by dicer are not shown—but can be compensated for. Three targeting sequences are shown. The required sequence identity overlapped is indicated by grey boxes. The N's of the parent 30 b.p. siNA are suggested sites of 2′-OH positions to enable Dicer cleavage if this is tested in stabilized chemistries. Note that processing of a 30mer duplex by Dicer RNase III does not give a precise 22+8 cleavage, but rather produces a series of closely related products (with 22+8 being the primary site). Therefore, processing by Dicer will yield a series of active siNAs. Another non-limiting example is shown in FIG. 26. A 40 base pair duplex is cleaved by Dicer into 20 base pair products from either end. For ease of presentation the overhangs generated by dicer are not shown—but can be compensated for. Four targeting sequences are shown in four colors, blue, light-blue and red and orange. The required sequence identity overlapped is indicated by grey boxes. This design format can be extended to larger RNAs. If chemically stabilized siNAs are bound by Dicer, then strategically located ribonucleotide linkages can enable designer cleavage products that permit our more extensive repertoire of multiifunctional designs. For example cleavage products not limited to the Dicer standard of approximately 22-nucleotides can allow multifunctional siNA constructs with a target sequence identity overlap ranging from, for example, about 3 to about 15 nucleotides.

### Example 11

### Diagnostic Uses

[0564] The siNA molecules of the invention can be used in a variety of diagnostic applications, such as in the identification of molecular targets (e.g., RNA) in a variety of applications, for example, in clinical, industrial, environmental, agricultural and/or research settings. Such diagnostic use of siNA molecules involves utilizing reconstituted RNAi systems, for example, using cellular lysates or partially purified cellular lysates. siNA molecules of this invention can be used as diagnostic tools to examine genetic drift and mutations within diseased cells or to detect the presence of endogenous or exogenous, for example viral, RNA in a cell. The close relationship between siNA activity and the structure of the target RNA allows the detection of mutations in any region of the molecule, which alters the base-pairing and three-dimensional structure of the target RNA. By using multiple siNA molecules described in this invention, one can map nucleotide changes, which are important to RNA structure and function in vitro, as well as in cells and tissues. Cleavage of target RNAs with siNA molecules can be used to inhibit gene expression and define the role of specified gene products in the progression of disease or infection. In this manner, other genetic targets can be defined as important mediators of the disease. These experiments will lead to better treatment of the disease progression by affording the possibility of combination therapies (e.g., multiple siNA molecules targeted to different genes, siNA molecules coupled with known small molecule inhibitors, or intermittent treatment with combinations siNA molecules and/or other chemical or biological molecules). Other in vitro uses of siNA molecules of this invention are well known in the art, and include detection of the presence of mRNAs associated with a disease, infection, or related condition. Such RNA is detected by determining the presence of a cleavage product after treatment with a siNA using standard methodologies, for example, fluorescence resonance emission transfer (FRET).

[0565] In a specific example, siNA molecules that cleave only wild-type or mutant forms of the target RNA are used for the assay. The first siNA molecules (i.e., those that cleave only wild-type forms of target RNA) are used to identify wild-type RNA present in the sample and the second siNA molecules (i.e., those that cleave only mutant forms of target RNA) are used to identify mutant RNA in the sample. As reaction controls, synthetic substrates of both wild-type and mutant RNA are cleaved by both siNA molecules to demonstrate the relative siNA efficiencies in the reactions and the absence of cleavage of the “non-targeted” RNA species. The cleavage products from the synthetic substrates also serve to generate size markers for the analysis of wild-type and mutant RNAs in the sample population. Thus, each analysis requires two siNA molecules, two substrates and one unknown sample, which is combined into six reactions. The presence of cleavage products is determined using an RNase protection assay so that full-length and cleavage fragments of each RNA can be analyzed in one lane of a polyacrylamide gel. It is not absolutely required to quantify the results to gain insight into the expression of mutant RNAs and putative risk of the desired phenotypic changes in target cells. The expression of mRNA whose protein product is implicated in the development of the phenotype (i.e., disease related or infection related) is adequate to establish risk. If probes of comparable specific activity are used for both transcripts, then a qualitative comparison of RNA levels is adequate and decreases the cost of the initial diagnosis. Higher mutant form to wild-type ratios are correlated with higher risk whether RNA levels are compared qualitatively or quantitatively.

[0566] All patents and publications mentioned in the specification are indicative of the levels of skill of those skilled in the art to which the invention pertains. All references cited in this disclosure are incorporated by reference to the same extent as if each reference had been incorporated by reference in its entirety individually.

[0567] One skilled in the art would readily appreciate that the present invention is well adapted to carry out the objects and obtain the ends and advantages mentioned, as well as those inherent therein. The methods and compositions described herein as presently representative of preferred embodiments are exemplary and are not intended as limitations on the scope of the invention. Changes therein and other uses will occur to those skilled in the art, which are encompassed within the spirit of the invention, are defined by the scope of the claims.

[0568] It will be readily apparent to one skilled in the art that varying substitutions and modifications can be made to the invention disclosed herein without departing from the scope and spirit of the invention. Thus, such additional embodiments are within the scope of the present invention and the following claims. The present invention teaches one skilled in the art to test various combinations and/or substitutions of chemical modifications described herein toward generating nucleic acid constructs with improved activity for mediating RNAi activity. Such improved activity can comprise improved stability, improved bioavailability, and/or improved activation of cellular responses mediating RNAi. Therefore, the specific embodiments described herein are not limiting and one skilled in the art can readily appreciate that specific combinations of the modifications described herein can be tested without undue experimentation toward identifying siNA molecules with improved RNAi activity.

[0569] The invention illustratively described herein suitably can be practiced in the absence of any element or elements, limitation or limitations that are not specifically disclosed herein. Thus, for example, in each instance herein any of the terms “comprising”, “consisting essentially of”, and “consisting of” may be replaced with either of the other two terms. The terms and expressions which have been employed are used as terms of description and not of limitation, and there is no intention that in the use of such terms and expressions of excluding any equivalents of the features shown and described or portions thereof, but it is recognized that various modifications are possible within the scope of the invention claimed. Thus, it should be understood that although -the present invention has been specifically disclosed by preferred embodiments, optional features, modification and variation of the concepts herein disclosed may be resorted to by those skilled in the art, and that such modifications and variations are considered to be within the scope of this invention as defined by the description and the appended claims.

[0570] In addition, where features or aspects of the invention are described in terms of Markush groups or other grouping of alternatives, those skilled in the art will recognize that the invention is also thereby described in terms of any individual member or subgroup of members of the Markush group or other group.

LENGTHY TABLE REFERENCED HERE
US20070099858A1-20070503-T00001
Please refer to the end of the specification for access instructions.

LENGTHY TABLE REFERENCED HERE
US20070099858A1-20070503-T00002
Please refer to the end of the specification for access instructions.

LENGTHY TABLE REFERENCED HERE
US20070099858A1-20070503-T00003
Please refer to the end of the specification for access instructions.

LENGTHY TABLE REFERENCED HERE
US20070099858A1-20070503-T00004
Please refer to the end of the specification for access instructions.

LENGTHY TABLE REFERENCED HERE
US20070099858A1-20070503-T00005
Please refer to the end of the specification for access instructions.

LENGTHY TABLE
The patent application contains a lengthy table section. A copy of the table is available in electronic form from the USPTO web site (http://seqdata.uspto.gov/?pageRequest=docDetail&DocID=US20070099858A1). An electronic copy of the table will also be available from the USPTO upon request and payment of the fee set forth in 37 CFR 1.19(b)(3).

What we claim is:

1. A double stranded nucleic acid molecule having structure SI comprising a sense strand and an antisense strand: [chemical structure]
wherein the upper strand is the sense strand and the lower strand is the antisense strand of the double stranded nucleic acid molecule; said antisense strand comprises sequence complementary to RNA of influenza A virus; each N is independently a nucleotide; each B is a terminal cap moiety that can be present or absent; (N) represents non-base paired or overhanging nucleotides which can be unmodified or chemically modified; [N] represents nucleotide positions wherein any purine nucleotides when present are ribonucleotides; X1 and X2 are independently integers from about 0 to about 4; X3 is an integer from about 9 to about 21; X4 is an integer from about 11 to about 20, provided that the sum of X4 and X5 is between 17-21; X5 is an integer from about 1 to about 6; and
(a) any pyridmidine nucleotides present in the antisense strand are 2′-deoxy-2′-fluoro nucleotides; any purine nucleotides present in the antisense strand other than the purines nucleotides in the [N] nucleotide positions, are independently 2′-O-methyl nucleotides, 2′-deoxyribonucleotides or a combination of 2′-deoxyribonucleotides and 2′-O-methyl nucleotides;
(b) any pyrimidine nucleotides present in the sense strand are 2′-deoxy-2′-fluoro nucleotides; any purine nucleotides present in the sense strand are independently 2′-deoxyribonucleotides, 2′-O-methyl nucleotides or a combination of 2′-deoxyribonucleotides and 2′-O-methyl nucleotides; and
(c) any (N) nucleotides are optionally deoxyribonucleotides.

2. A double stranded nucleic acid molecule having structure SII comprising a sense strand and an antisense strand: [chemical structure]
wherein the upper strand is the sense strand and the lower strand is the antisense strand of the double stranded nucleic acid molecule; said antisense strand comprises sequence complementary to RNA of influenza A virus; each N is independently a nucleotide; each B is a terminal cap moiety that can be present or absent; (N) represents non-base paired or overhanging nucleotides which can be unmodified or chemically modified; [N] represents nucleotide positions wherein any purine nucleotides when present are ribonucleotides; X1 and X2 are independently integers from about 0 to about 4; X3 is an integer from about 9 to about 21; X4 is an integer from about 11 to about 20, provided that the sum of X4 and X5 is between 17-21; X5 is an integer from about 1 to about 6; and
(a) any pyridmidine nucleotides present in the antisense strand are 2′-deoxy-2′-fluoro nucleotides; any purine nucleotides present in the antisense strand other than the purines nucleotides in the [N] nucleotide positions, are 2′-O-methyl nucleotides;
(b) any pyrimidine nucleotides present in the sense strand are ribonucleotides; any purine nucleotides present in the sense strand are ribonucleotides; and
(c) any (N) nucleotides are optionally deoxyribonucleotides.

3. A double stranded nucleic acid molecule having structure SIII comprising a sense strand and an antisense strand: [chemical structure]
wherein the upper strand is the sense strand and the lower strand is the antisense strand of the double stranded nucleic acid molecule; said antisense strand comprises sequence complementary to RNA of influenza A virus; each N is independently a nucleotide; each B is a terminal cap moiety that can be present or absent; (N) represents non-base paired or overhanging nucleotides which can be unmodified or chemically modified; [N] represents nucleotide positions wherein any purine nucleotides when present are ribonucleotides; X1 and X2 are independently integers from about 0 to about 4; X3 is an integer from about 9 to about 21; X4 is an integer from about 11 to about 20, provided that the sum of X4 and X5 is between 17-21; X5 is an integer from about 1 to about 6; and
(a) any pyridmidine nucleotides present in the antisense strand are 2′-deoxy-2′-fluoro nucleotides; any purine nucleotides present in the antisense strand other than the purines nucleotides in the [N] nucleotide positions, are 2′-O-methyl nucleotides;
(b) any pyrimidine nucleotides present in the sense strand are 2′-deoxy-2′-fluoro nucleotides; any purine nucleotides present in the sense strand are ribonucleotides; and
(c) any (N) nucleotides are optionally deoxyribonucleotides.

4. A double stranded nucleic acid molecule having structure SIV comprising a sense strand and an antisense strand: [chemical structure]
wherein the upper strand is the sense strand and the lower strand is the antisense strand of the double stranded nucleic acid molecule; said antisense strand comprises sequence complementary to RNA of influenza A virus; each N is independently a nucleotide; each B is a terminal cap moiety that can be present or absent; (N) represents non-base paired or overhanging nucleotides which can be unmodified or chemically modified; [N] represents nucleotide positions wherein any purine nucleotides when present are ribonucleotides; X1 and X2 are independently integers from about 0 to about 4; X3 is an integer from about 9 to about 21; X4 is an integer from about 11 to about 20, provided that the sum of X4 and X5 is between 17-21; X5 is an integer from about 1 to about 6; and
(a) any pyridmidine nucleotides present in the antisense strand are 2′-deoxy-2′-fluoro nucleotides; any purine nucleotides present in the antisense strand other than the purines nucleotides in the [N] nucleotide positions, are 2′-O-methyl nucleotides;
(b) any pyrimidine nucleotides present in the sense strand are 2′-deoxy-2′-fluoro nucleotides; any purine nucleotides present in the sense strand are deoxyribonucleotides; and
(c) any (N) nucleotides are optionally deoxyribonucleotides.

5. A double stranded nucleic acid molecule having structure SV comprising a sense strand and an antisense strand: [chemical structure]
wherein the upper strand is the sense strand and the lower strand is the antisense strand of the double stranded nucleic acid molecule; said antisense strand comprises sequence complementary to RNA of influenza A virus; each N is independently a nucleotide; each B is a terminal cap moiety that can be present or absent; (N) represents non-base paired or overhanging nucleotides which can be unmodified or chemically modified; [N] represents nucleotide positions wherein any purine nucleotides when present are ribonucleotides; X1 and X2 are independently integers from about 0 to about 4; X3 is an integer from about 9 to about 21; X4 is an integer from about 11 to about 20, provided that the sum of X4 and X5 is between 17-21; X5 is an integer from about 1 to about 6; and
(a) any pyridmidine nucleotides present in the antisense strand are nucleotides having a ribo-like, Northern or A-form helix configuration; any purine nucleotides present in the antisense strand other than the purines nucleotides in the [N] nucleotide positions, are 2′-O-methyl nucleotides;
(b) any pyrimidine nucleotides present in the sense strand are nucleotides having a ribo-like, Northern or A-form helix configuration; any purine nucleotides present in the sense strand are 2′-O-methyl nucleotides; and
(c) any (N) nucleotides are optionally deoxyribonucleotides.

6. The double stranded nucleic acid molecule of claim 1, wherein said influenza virus RNA is influenza virus plus strand or minus strand RNA.

7. The double stranded nucleic acid molecule of claim 2, wherein said influenza A virus RNA is influenza virus plus strand or minus strand RNA.

8. The double stranded nucleic acid molecule of claim 3, wherein said influenza A virus RNA is influenza virus plus strand or minus strand RNA.

9. The double stranded nucleic acid molecule of claim 4, wherein said influenza A virus RNA is influenza virus plus strand or minus strand RNA.

10. The double stranded nucleic acid molecule of claim 5, wherein said influenza A virus RNA is influenza virus plus strand or minus strand RNA.

11. The double stranded nucleic acid molecule of claim 1, wherein said influenza virus RNA is derived from strain H5N1.

12. The double stranded nucleic acid molecule of claim 2, wherein said influenza virus RNA is derived from strain H5N1.

13. The double stranded nucleic acid molecule of claim 3, wherein said influenza virus RNA is derived from strain H5N1.

14. The double stranded nucleic acid molecule of claim 4, wherein said influenza virus RNA is derived from strain H5N1.

15. The double stranded nucleic acid molecule of claim 5, wherein said influenza virus RNA is derived from strain H5N1.

16. The double stranded nucleic acid molecule of claim 1, wherein X5=1, 2, or 3; each X1 and X2=1 or 2; X3=12, 13, 14, 15, 16, 17, 18, 19, 20, 21, 22, 23, 24, 25, 26, 27, 28, 29, or 30, and X4=15, 16, 17, 18, 19, 20, 21, 22, 23, 24, 25, 26, 27, 28, 29, or 30.

17. The double stranded nucleic acid molecule of claim 2, wherein X5=1, 2, or 3; each X1 and X2=1 or 2; X3=12, 13, 14, 15, 16, 17, 18, 19, 20, 21, 22, 23, 24, 25, 26, 27, 28, 29, or 30, and X4=15, 16, 17, 18, 19, 20, 21, 22, 23, 24, 25, 26, 27, 28, 29, or 30.

18. The double stranded nucleic acid molecule of claim 3, wherein X5=1, 2, or 3; each X1 and X2=1 or 2; X3=12, 13, 14, 15, 16, 17, 18, 19, 20, 21, 22, 23,24, 25, 26, 27, 28, 29, or 30, and X4=15, 16, 17, 18, 19, 20, 21, 22, 23, 24, 25, 26, 27, 28, 29, or 30.

19. The double stranded nucleic acid molecule of claim 4, wherein X5=1, 2, or 3; each X1 and X2=1 or 2; X3=12, 13, 14, 15, 16, 17, 18, 19, 20, 21, 22, 23, 24, 25, 26, 27, 28, 29, or 30, and X4=15, 16, 17, 18, 19,20, 21, 22, 23, 24, 25, 26, 27, 28, 29, or 30.

20. The double stranded nucleic acid molecule of claim 5, wherein X5=1, 2, or 3; each X1 and X2=1 or 2; X3=12, 13, 14, 15, 16, 17, 18, 19, 20, 21, 22, 23, 24, 25, 26, 27, 28, 29, or 30, and X4=15, 16, 17, 18, 19, 20, 21, 22, 23, 24, 25, 26, 27, 28, 29, or 30.

21. The double stranded nucleic acid molecule of claim 1, wherein B is present at the 3′ and 5′ ends of the sense strand and at the 3′-end of the antisense strand.

22. The double stranded nucleic acid molecule of claim 2, wherein B is present at the 3′ and 5′ ends of the sense strand and at the 3′-end of the antisense strand.

23. The double stranded nucleic acid molecule of claim 3, wherein B is present at the 3′ and 5′ ends of the sense strand and at the 3′-end of the antisense strand.

24. The double stranded nucleic acid molecule of claim 4, wherein B is present at the 3′ and 5′ ends of the sense strand and at the 3′-end of the antisense strand.

25. The double stranded nucleic acid molecule of claim 5, wherein B is present at the 3′ and 5′ ends of the sense strand and at the 3′-end of the antisense strand.

26. The double stranded nucleic acid molecule of claim 1, comprising one or more phosphorothioate intemucleotide linkages at the first terminal (N) on the 3′end of the sense strand, antisense strand, or both sense strand and antisense strands of the siNA molecule.

27. The double stranded nucleic acid molecule of claim 2, comprising one or more phosphorothioate intemucleotide linkages at the first terminal (N) on the 3′end of the sense strand, antisense strand, or both sense strand and antisense strands of the siNA molecule.

28. The double stranded nucleic acid molecule of claim 3, comprising one or more phosphorothioate internucleotide linkages at the first terminal (N) on the 3′end of the sense strand, antisense strand, or both sense strand and antisense strands of the siNA molecule.

29. The double stranded nucleic acid molecule of claim 4, comprising one or more phosphorothioate internucleotide linkages at the first terminal (N) on the 3′end of the sense strand, antisense strand, or both sense strand and antisense strands of the siNA molecule.

30. The double stranded nucleic acid molecule of claim 5, comprising one or more phosphorothioate internucleotide linkages at the first terminal (N) on the 3′end of the sense strand, antisense strand, or both sense strand and antisense strands of the siNA molecule.

The application's sequence listing, which the Patent Office published only in electronic form, follows.

SEQUENCE LISTING (9212 sequences)

SEQ ID NO: 1 - RNA, 19 nt, Artificial Sequence
  synthetic
aaaagcaggucaauuauau

SEQ ID NO: 2 - RNA, 19 nt, Artificial Sequence
  synthetic
uucaguauggaaagaauaa

SEQ ID NO: 3 - RNA, 19 nt, Artificial Sequence
  synthetic
auggaaagaauaaaagaac

SEQ ID NO: 4 - RNA, 19 nt, Artificial Sequence
  synthetic
uggaaagaauaaaagaacu

SEQ ID NO: 5 - RNA, 19 nt, Artificial Sequence
  synthetic
ggaaagaauaaaagaacua

SEQ ID NO: 6 - RNA, 19 nt, Artificial Sequence
  synthetic
gaaagaauaaaagaacuac

SEQ ID NO: 7 - RNA, 19 nt, Artificial Sequence
  synthetic
aaagaauaaaagaacuacg

SEQ ID NO: 8 - RNA, 19 nt, Artificial Sequence
  synthetic
aagaauaaaagaacuacgg

SEQ ID NO: 9 - RNA, 19 nt, Artificial Sequence
  synthetic
agaauaaaagaacuacgga

SEQ ID NO: 10 - RNA, 19 nt, Artificial Sequence
  synthetic
aaagaacuacggaaccuga

SEQ ID NO: 11 - RNA, 19 nt, Artificial Sequence
  synthetic
augucgcagucucgcacuc

SEQ ID NO: 12 - RNA, 19 nt, Artificial Sequence
  synthetic
ugucgcagucucgcacucg

SEQ ID NO: 13 - RNA, 19 nt, Artificial Sequence
  synthetic
gucgcagucucgcacucgc

SEQ ID NO: 14 - RNA, 19 nt, Artificial Sequence
  synthetic
ucgcagucucgcacucgcg

SEQ ID NO: 15 - RNA, 19 nt, Artificial Sequence
  synthetic
cgcagucucgcacucgcga

SEQ ID NO: 16 - RNA, 19 nt, Artificial Sequence
  synthetic
gcagucucgcacucgcgag

SEQ ID NO: 17 - RNA, 19 nt, Artificial Sequence
  synthetic
cagucucgcacucgcgaga

SEQ ID NO: 18 - RNA, 19 nt, Artificial Sequence
  synthetic
agucucgcacucgcgagau

SEQ ID NO: 19 - RNA, 19 nt, Artificial Sequence
  synthetic
gucucgcacucgcgagaua

SEQ ID NO: 20 - RNA, 19 nt, Artificial Sequence
  synthetic
ucucgcacucgcgagauac

SEQ ID NO: 21 - RNA, 19 nt, Artificial Sequence
  synthetic
cucgcacucgcgagauacu

SEQ ID NO: 22 - RNA, 19 nt, Artificial Sequence
  synthetic
cgcgagauacuaacaaaaa

SEQ ID NO: 23 - RNA, 19 nt, Artificial Sequence
  synthetic
acaaaaaccacaguggacc

SEQ ID NO: 24 - RNA, 19 nt, Artificial Sequence
  synthetic
caaaaaccacaguggacca

SEQ ID NO: 25 - RNA, 19 nt, Artificial Sequence
  synthetic
aaaaaccacaguggaccau

SEQ ID NO: 26 - RNA, 19 nt, Artificial Sequence
  synthetic
aaaaccacaguggaccaua

SEQ ID NO: 27 - RNA, 19 nt, Artificial Sequence
  synthetic
aaaccacaguggaccauau

SEQ ID NO: 28 - RNA, 19 nt, Artificial Sequence
  synthetic
aaccacaguggaccauaug

SEQ ID NO: 29 - RNA, 19 nt, Artificial Sequence
  synthetic
accacaguggaccauaugg

SEQ ID NO: 30 - RNA, 19 nt, Artificial Sequence
  synthetic
ccacaguggaccauauggc

SEQ ID NO: 31 - RNA, 19 nt, Artificial Sequence
  synthetic
cacaguggaccauauggcc

SEQ ID NO: 32 - RNA, 19 nt, Artificial Sequence
  synthetic
acaguggaccauauggcca

SEQ ID NO: 33 - RNA, 19 nt, Artificial Sequence
  synthetic
caguggaccauauggccau

SEQ ID NO: 34 - RNA, 19 nt, Artificial Sequence
  synthetic
aguggaccauauggccaua

SEQ ID NO: 35 - RNA, 19 nt, Artificial Sequence
  synthetic
guggaccauauggccauaa

SEQ ID NO: 36 - RNA, 19 nt, Artificial Sequence
  synthetic
uggaccauauggccauaau

SEQ ID NO: 37 - RNA, 19 nt, Artificial Sequence
  synthetic
ggaccauauggccauaauu

SEQ ID NO: 38 - RNA, 19 nt, Artificial Sequence
  synthetic
gaccauauggccauaauua

SEQ ID NO: 39 - RNA, 19 nt, Artificial Sequence
  synthetic
accauauggccauaauuaa

SEQ ID NO: 40 - RNA, 19 nt, Artificial Sequence
  synthetic
ccauauggccauaauuaag

SEQ ID NO: 41 - RNA, 19 nt, Artificial Sequence
  synthetic
cauauggccauaauuaaga

SEQ ID NO: 42 - RNA, 19 nt, Artificial Sequence
  synthetic
auauggccauaauuaagaa

SEQ ID NO: 43 - RNA, 19 nt, Artificial Sequence
  synthetic
uauggccauaauuaagaag

SEQ ID NO: 44 - RNA, 19 nt, Artificial Sequence
  synthetic
auggccauaauuaagaagu

SEQ ID NO: 45 - RNA, 19 nt, Artificial Sequence
  synthetic
uggccauaauuaagaagua

SEQ ID NO: 46 - RNA, 19 nt, Artificial Sequence
  synthetic
ggccauaauuaagaaguac

SEQ ID NO: 47 - RNA, 19 nt, Artificial Sequence
  synthetic
gccauaauuaagaaguaca

SEQ ID NO: 48 - RNA, 19 nt, Artificial Sequence
  synthetic
ccauaauuaagaaguacac

SEQ ID NO: 49 - RNA, 19 nt, Artificial Sequence
  synthetic
cauaauuaagaaguacaca

SEQ ID NO: 50 - RNA, 19 nt, Artificial Sequence
  synthetic
auaauuaagaaguacacau

SEQ ID NO: 51 - RNA, 19 nt, Artificial Sequence
  synthetic
uaauuaagaaguacacauc

SEQ ID NO: 52 - RNA, 19 nt, Artificial Sequence
  synthetic
acaucagggagacaggaaa

SEQ ID NO: 53 - RNA, 19 nt, Artificial Sequence
  synthetic
gggagacaggaaaagaacc

SEQ ID NO: 54 - RNA, 19 nt, Artificial Sequence
  synthetic
ggagacaggaaaagaaccc

SEQ ID NO: 55 - RNA, 19 nt, Artificial Sequence
  synthetic
gagacaggaaaagaacccg

SEQ ID NO: 56 - RNA, 19 nt, Artificial Sequence
  synthetic
agacaggaaaagaacccgu

SEQ ID NO: 57 - RNA, 19 nt, Artificial Sequence
  synthetic
gacaggaaaagaacccguc

SEQ ID NO: 58 - RNA, 19 nt, Artificial Sequence
  synthetic
acaggaaaagaacccguca

SEQ ID NO: 59 - RNA, 19 nt, Artificial Sequence
  synthetic
caggaaaagaacccgucac

SEQ ID NO: 60 - RNA, 19 nt, Artificial Sequence
  synthetic
aggaaaagaacccgucacu

SEQ ID NO: 61 - RNA, 19 nt, Artificial Sequence
  synthetic
ggaaaagaacccgucacuu

SEQ ID NO: 62 - RNA, 19 nt, Artificial Sequence
  synthetic
gaaaagaacccgucacuua

SEQ ID NO: 63 - RNA, 19 nt, Artificial Sequence
  synthetic
aaaagaacccgucacuuag

SEQ ID NO: 64 - RNA, 19 nt, Artificial Sequence
  synthetic
aaagaacccgucacuuagg

SEQ ID NO: 65 - RNA, 19 nt, Artificial Sequence
  synthetic
aagaacccgucacuuagga

SEQ ID NO: 66 - RNA, 19 nt, Artificial Sequence
  synthetic
agaacccgucacuuaggau

SEQ ID NO: 67 - RNA, 19 nt, Artificial Sequence
  synthetic
gaacccgucacuuaggaug

SEQ ID NO: 68 - RNA, 19 nt, Artificial Sequence
  synthetic
aacccgucacuuaggauga

SEQ ID NO: 69 - RNA, 19 nt, Artificial Sequence
  synthetic
acccgucacuuaggaugaa

SEQ ID NO: 70 - RNA, 19 nt, Artificial Sequence
  synthetic
cccgucacuuaggaugaaa

SEQ ID NO: 71 - RNA, 19 nt, Artificial Sequence
  synthetic
ccgucacuuaggaugaaau

SEQ ID NO: 72 - RNA, 19 nt, Artificial Sequence
  synthetic
cgucacuuaggaugaaaug

SEQ ID NO: 73 - RNA, 19 nt, Artificial Sequence
  synthetic
gucacuuaggaugaaaugg

SEQ ID NO: 74 - RNA, 19 nt, Artificial Sequence
  synthetic
ucacuuaggaugaaaugga

SEQ ID NO: 75 - RNA, 19 nt, Artificial Sequence
  synthetic
cacuuaggaugaaauggau

SEQ ID NO: 76 - RNA, 19 nt, Artificial Sequence
  synthetic
acuuaggaugaaauggaug

SEQ ID NO: 77 - RNA, 19 nt, Artificial Sequence
  synthetic
cuuaggaugaaauggauga

SEQ ID NO: 78 - RNA, 19 nt, Artificial Sequence
  synthetic
uuaggaugaaauggaugau

SEQ ID NO: 79 - RNA, 19 nt, Artificial Sequence
  synthetic
uaggaugaaauggaugaug

SEQ ID NO: 80 - RNA, 19 nt, Artificial Sequence
  synthetic
aggaugaaauggaugaugg

SEQ ID NO: 81 - RNA, 19 nt, Artificial Sequence
  synthetic
ggaugaaauggaugauggc

SEQ ID NO: 82 - RNA, 19 nt, Artificial Sequence
  synthetic
gaugaaauggaugauggca

SEQ ID NO: 83 - RNA, 19 nt, Artificial Sequence
  synthetic
augaaauggaugauggcaa

SEQ ID NO: 84 - RNA, 19 nt, Artificial Sequence
  synthetic
ugaaauggaugauggcaau

SEQ ID NO: 85 - RNA, 19 nt, Artificial Sequence
  synthetic
gaaauggaugauggcaaug

SEQ ID NO: 86 - RNA, 19 nt, Artificial Sequence
  synthetic
aaauggaugauggcaauga

SEQ ID NO: 87 - RNA, 19 nt, Artificial Sequence
  synthetic
aauggaugauggcaaugaa

SEQ ID NO: 88 - RNA, 19 nt, Artificial Sequence
  synthetic
auggaugauggcaaugaaa

SEQ ID NO: 89 - RNA, 19 nt, Artificial Sequence
  synthetic
uggaugauggcaaugaaau

SEQ ID NO: 90 - RNA, 19 nt, Artificial Sequence
  synthetic
ggaugauggcaaugaaaua

SEQ ID NO: 91 - RNA, 19 nt, Artificial Sequence
  synthetic
augaaauauccaaucacug

SEQ ID NO: 92 - RNA, 19 nt, Artificial Sequence
  synthetic
gcugacaaaaggauaacag

SEQ ID NO: 93 - RNA, 19 nt, Artificial Sequence
  synthetic
gaaaugguuccggagagaa

SEQ ID NO: 94 - RNA, 19 nt, Artificial Sequence
  synthetic
aaugaacaaggacaaacuc

SEQ ID NO: 95 - RNA, 19 nt, Artificial Sequence
  synthetic
gaacaaggacaaacucuau

SEQ ID NO: 96 - RNA, 19 nt, Artificial Sequence
  synthetic
aacaaggacaaacucuaug

SEQ ID NO: 97 - RNA, 19 nt, Artificial Sequence
  synthetic
acaaggacaaacucuaugg

SEQ ID NO: 98 - RNA, 19 nt, Artificial Sequence
  synthetic
caaggacaaacucuaugga

SEQ ID NO: 99 - RNA, 19 nt, Artificial Sequence
  synthetic
aaggacaaacucuauggag

SEQ ID NO: 100 - RNA, 19 nt, Artificial Sequence
  synthetic
aggacaaacucuauggagu

SEQ ID NO: 101 - RNA, 19 nt, Artificial Sequence
  synthetic
ggacaaacucuauggagua

SEQ ID NO: 102 - RNA, 19 nt, Artificial Sequence
  synthetic
gacaaacucuauggaguaa

SEQ ID NO: 103 - RNA, 19 nt, Artificial Sequence
  synthetic
acaaacucuauggaguaaa

SEQ ID NO: 104 - RNA, 19 nt, Artificial Sequence
  synthetic
caaacucuauggaguaaaa

SEQ ID NO: 105 - RNA, 19 nt, Artificial Sequence
  synthetic
aaacucuauggaguaaaau

SEQ ID NO: 106 - RNA, 19 nt, Artificial Sequence
  synthetic
aacucuauggaguaaaaug

SEQ ID NO: 107 - RNA, 19 nt, Artificial Sequence
  synthetic
acucuauggaguaaaauga

SEQ ID NO: 108 - RNA, 19 nt, Artificial Sequence
  synthetic
cucuauggaguaaaaugag

SEQ ID NO: 109 - RNA, 19 nt, Artificial Sequence
  synthetic
ucuauggaguaaaaugagu

SEQ ID NO: 110 - RNA, 19 nt, Artificial Sequence
  synthetic
cuauggaguaaaaugagug

SEQ ID NO: 111 - RNA, 19 nt, Artificial Sequence
  synthetic
uauggaguaaaaugaguga

SEQ ID NO: 112 - RNA, 19 nt, Artificial Sequence
  synthetic
auggaguaaaaugagugau

SEQ ID NO: 113 - RNA, 19 nt, Artificial Sequence
  synthetic
uggaguaaaaugagugaug

SEQ ID NO: 114 - RNA, 19 nt, Artificial Sequence
  synthetic
ggaguaaaaugagugaugc

SEQ ID NO: 115 - RNA, 19 nt, Artificial Sequence
  synthetic
gaguaaaaugagugaugcu

SEQ ID NO: 116 - RNA, 19 nt, Artificial Sequence
  synthetic
aguaaaaugagugaugcug

SEQ ID NO: 117 - RNA, 19 nt, Artificial Sequence
  synthetic
guaaaaugagugaugcugg

SEQ ID NO: 118 - RNA, 19 nt, Artificial Sequence
  synthetic
uaaaaugagugaugcugga

SEQ ID NO: 119 - RNA, 19 nt, Artificial Sequence
  synthetic
aaaaugagugaugcuggau

SEQ ID NO: 120 - RNA, 19 nt, Artificial Sequence
  synthetic
aaaugagugaugcuggauc

SEQ ID NO: 121 - RNA, 19 nt, Artificial Sequence
  synthetic
aaugagugaugcuggauca

SEQ ID NO: 122 - RNA, 19 nt, Artificial Sequence
  synthetic
augagugaugcuggaucag

SEQ ID NO: 123 - RNA, 19 nt, Artificial Sequence
  synthetic
ugagugaugcuggaucaga

SEQ ID NO: 124 - RNA, 19 nt, Artificial Sequence
  synthetic
gagugaugcuggaucagau

SEQ ID NO: 125 - RNA, 19 nt, Artificial Sequence
  synthetic
agugaugcuggaucagauc

SEQ ID NO: 126 - RNA, 19 nt, Artificial Sequence
  synthetic
gugaugcuggaucagaucg

SEQ ID NO: 127 - RNA, 19 nt, Artificial Sequence
  synthetic
ugaugcuggaucagaucga

SEQ ID NO: 128 - RNA, 19 nt, Artificial Sequence
  synthetic
gaugcuggaucagaucgag

SEQ ID NO: 129 - RNA, 19 nt, Artificial Sequence
  synthetic
augcuggaucagaucgagu

SEQ ID NO: 130 - RNA, 19 nt, Artificial Sequence
  synthetic
ugcuggaucagaucgagug

SEQ ID NO: 131 - RNA, 19 nt, Artificial Sequence
  synthetic
gcuggaucagaucgaguga

SEQ ID NO: 132 - RNA, 19 nt, Artificial Sequence
  synthetic
cuggaucagaucgagugau

SEQ ID NO: 133 - RNA, 19 nt, Artificial Sequence
  synthetic
uggaucagaucgagugaug

SEQ ID NO: 134 - RNA, 19 nt, Artificial Sequence
  synthetic
ucagaucgagugaugguau

SEQ ID NO: 135 - RNA, 19 nt, Artificial Sequence
  synthetic
cagaucgagugaugguauc

SEQ ID NO: 136 - RNA, 19 nt, Artificial Sequence
  synthetic
agaucgagugaugguauca

SEQ ID NO: 137 - RNA, 19 nt, Artificial Sequence
  synthetic
gaucgagugaugguaucac

SEQ ID NO: 138 - RNA, 19 nt, Artificial Sequence
  synthetic
aucgagugaugguaucacc

SEQ ID NO: 139 - RNA, 19 nt, Artificial Sequence
  synthetic
ucgagugaugguaucaccu

SEQ ID NO: 140 - RNA, 19 nt, Artificial Sequence
  synthetic
cgagugaugguaucaccuu

SEQ ID NO: 141 - RNA, 19 nt, Artificial Sequence
  synthetic
gagugaugguaucaccuuu

SEQ ID NO: 142 - RNA, 19 nt, Artificial Sequence
  synthetic
agugaugguaucaccuuug

SEQ ID NO: 143 - RNA, 19 nt, Artificial Sequence
  synthetic
gugaugguaucaccuuugg

SEQ ID NO: 144 - RNA, 19 nt, Artificial Sequence
  synthetic
ugaugguaucaccuuuggc

SEQ ID NO: 145 - RNA, 19 nt, Artificial Sequence
  synthetic
gcugugacaugguggaaua

SEQ ID NO: 146 - RNA, 19 nt, Artificial Sequence
  synthetic
acaugguggaauagaaaug

SEQ ID NO: 147 - RNA, 19 nt, Artificial Sequence
  synthetic
caugguggaauagaaaugg

SEQ ID NO: 148 - RNA, 19 nt, Artificial Sequence
  synthetic
augguggaauagaaaugga

SEQ ID NO: 149 - RNA, 19 nt, Artificial Sequence
  synthetic
ugguggaauagaaauggac

SEQ ID NO: 150 - RNA, 19 nt, Artificial Sequence
  synthetic
gguggaauagaaauggacc

SEQ ID NO: 151 - RNA, 19 nt, Artificial Sequence
  synthetic
agaaauggacccgugacaa

SEQ ID NO: 152 - RNA, 19 nt, Artificial Sequence
  synthetic
aguacgguccacuacccaa

SEQ ID NO: 153 - RNA, 19 nt, Artificial Sequence
  synthetic
uacccaaaaguauacaaga

SEQ ID NO: 154 - RNA, 19 nt, Artificial Sequence
  synthetic
acccaaaaguauacaagac

SEQ ID NO: 155 - RNA, 19 nt, Artificial Sequence
  synthetic
cccaaaaguauacaagacu

SEQ ID NO: 156 - RNA, 19 nt, Artificial Sequence
  synthetic
ccaaaaguauacaagacuu

SEQ ID NO: 157 - RNA, 19 nt, Artificial Sequence
  synthetic
caaaaguauacaagacuua

SEQ ID NO: 158 - RNA, 19 nt, Artificial Sequence
  synthetic
aaaguauacaagacuuauu

SEQ ID NO: 159 - RNA, 19 nt, Artificial Sequence
  synthetic
uuugacaaagucgaaaggu

SEQ ID NO: 160 - RNA, 19 nt, Artificial Sequence
  synthetic
gaaagguuaaaacauggaa

SEQ ID NO: 161 - RNA, 19 nt, Artificial Sequence
  synthetic
aaagguuaaaacauggaac

SEQ ID NO: 162 - RNA, 19 nt, Artificial Sequence
  synthetic
aagguuaaaacauggaacc

SEQ ID NO: 163 - RNA, 19 nt, Artificial Sequence
  synthetic
agguuaaaacauggaaccu

SEQ ID NO: 164 - RNA, 19 nt, Artificial Sequence
  synthetic
gguuaaaacauggaaccuu

SEQ ID NO: 165 - RNA, 19 nt, Artificial Sequence
  synthetic
guuaaaacauggaaccuuu

SEQ ID NO: 166 - RNA, 19 nt, Artificial Sequence
  synthetic
uuaaaacauggaaccuuug

SEQ ID NO: 167 - RNA, 19 nt, Artificial Sequence
  synthetic
uaaaacauggaaccuuugg

SEQ ID NO: 168 - RNA, 19 nt, Artificial Sequence
  synthetic
aaaacauggaaccuuuggc

SEQ ID NO: 169 - RNA, 19 nt, Artificial Sequence
  synthetic
aaacauggaaccuuuggcc

SEQ ID NO: 170 - RNA, 19 nt, Artificial Sequence
  synthetic
aacauggaaccuuuggccc

SEQ ID NO: 171 - RNA, 19 nt, Artificial Sequence
  synthetic
ggcccuguucauuuuagaa

SEQ ID NO: 172 - RNA, 19 nt, Artificial Sequence
  synthetic
guucauuuuagaaaucaag

SEQ ID NO: 173 - RNA, 19 nt, Artificial Sequence
  synthetic
uucauuuuagaaaucaagu

SEQ ID NO: 174 - RNA, 19 nt, Artificial Sequence
  synthetic
ucauuuuagaaaucaaguc

SEQ ID NO: 175 - RNA, 19 nt, Artificial Sequence
  synthetic
cauuuuagaaaucaaguca

SEQ ID NO: 176 - RNA, 19 nt, Artificial Sequence
  synthetic
auuuuagaaaucaagucaa

SEQ ID NO: 177 - RNA, 19 nt, Artificial Sequence
  synthetic
uuuuagaaaucaagucaag

SEQ ID NO: 178 - RNA, 19 nt, Artificial Sequence
  synthetic
uuuagaaaucaagucaaga

SEQ ID NO: 179 - RNA, 19 nt, Artificial Sequence
  synthetic
uuagaaaucaagucaagau

SEQ ID NO: 180 - RNA, 19 nt, Artificial Sequence
  synthetic
uagaaaucaagucaagaua

SEQ ID NO: 181 - RNA, 19 nt, Artificial Sequence
  synthetic
agaaaucaagucaagauac

SEQ ID NO: 182 - RNA, 19 nt, Artificial Sequence
  synthetic
gaaaucaagucaagauacg

SEQ ID NO: 183 - RNA, 19 nt, Artificial Sequence
  synthetic
aaaucaagucaagauacgc

SEQ ID NO: 184 - RNA, 19 nt, Artificial Sequence
  synthetic
aaucaagucaagauacgcc

SEQ ID NO: 185 - RNA, 19 nt, Artificial Sequence
  synthetic
cgaagaguagacauaaacc

SEQ ID NO: 186 - RNA, 19 nt, Artificial Sequence
  synthetic
gaagaguagacauaaaccc

SEQ ID NO: 187 - RNA, 19 nt, Artificial Sequence
  synthetic
aagaguagacauaaacccu

SEQ ID NO: 188 - RNA, 19 nt, Artificial Sequence
  synthetic
agaguagacauaaacccug

SEQ ID NO: 189 - RNA, 19 nt, Artificial Sequence
  synthetic
gaguagacauaaacccugg

SEQ ID NO: 190 - RNA, 19 nt, Artificial Sequence
  synthetic
gacauaaacccuggucaug

SEQ ID NO: 191 - RNA, 19 nt, Artificial Sequence
  synthetic
acauaaacccuggucaugc

SEQ ID NO: 192 - RNA, 19 nt, Artificial Sequence
  synthetic
ccuggucaugcagaccuca

SEQ ID NO: 193 - RNA, 19 nt, Artificial Sequence
  synthetic
agugccaaggaggcacaag

SEQ ID NO: 194 - RNA, 19 nt, Artificial Sequence
  synthetic
gauguaauuauggaaguug

SEQ ID NO: 195 - RNA, 19 nt, Artificial Sequence
  synthetic
auguaauuauggaaguugu

SEQ ID NO: 196 - RNA, 19 nt, Artificial Sequence
  synthetic
uguaauuauggaaguuguu

SEQ ID NO: 197 - RNA, 19 nt, Artificial Sequence
  synthetic
guaauuauggaaguuguuu

SEQ ID NO: 198 - RNA, 19 nt, Artificial Sequence
  synthetic
uaauuauggaaguuguuuu

SEQ ID NO: 199 - RNA, 19 nt, Artificial Sequence
  synthetic
aauuauggaaguuguuuuu

SEQ ID NO: 200 - RNA, 19 nt, Artificial Sequence
  synthetic
auuauggaaguuguuuuuc

SEQ ID NO: 201 - RNA, 19 nt, Artificial Sequence
  synthetic
uuauggaaguuguuuuucc

SEQ ID NO: 202 - RNA, 19 nt, Artificial Sequence
  synthetic
uauggaaguuguuuuuccc

SEQ ID NO: 203 - RNA, 19 nt, Artificial Sequence
  synthetic
auggaaguuguuuuuccca

SEQ ID NO: 204 - RNA, 19 nt, Artificial Sequence
  synthetic
uggaaguuguuuuucccaa

SEQ ID NO: 205 - RNA, 19 nt, Artificial Sequence
  synthetic
ggaaguuguuuuucccaau

SEQ ID NO: 206 - RNA, 19 nt, Artificial Sequence
  synthetic
gaaguuguuuuucccaaug

SEQ ID NO: 207 - RNA, 19 nt, Artificial Sequence
  synthetic
aaguuguuuuucccaauga

SEQ ID NO: 208 - RNA, 19 nt, Artificial Sequence
  synthetic
uuguuuuucccaaugaagu

SEQ ID NO: 209 - RNA, 19 nt, Artificial Sequence
  synthetic
uguuuuucccaaugaagug

SEQ ID NO: 210 - RNA, 19 nt, Artificial Sequence
  synthetic
guuuuucccaaugaagugg

SEQ ID NO: 211 - RNA, 19 nt, Artificial Sequence
  synthetic
uuuuucccaaugaaguggg

SEQ ID NO: 212 - RNA, 19 nt, Artificial Sequence
  synthetic
gugggagccaggauacuaa

SEQ ID NO: 213 - RNA, 19 nt, Artificial Sequence
  synthetic
ugggagccaggauacuaac

SEQ ID NO: 214 - RNA, 19 nt, Artificial Sequence
  synthetic
gggagccaggauacuaaca

SEQ ID NO: 215 - RNA, 19 nt, Artificial Sequence
  synthetic
ggagccaggauacuaacau

SEQ ID NO: 216 - RNA, 19 nt, Artificial Sequence
  synthetic
gagccaggauacuaacauc

SEQ ID NO: 217 - RNA, 19 nt, Artificial Sequence
  synthetic
agccaggauacuaacauca

SEQ ID NO: 218 - RNA, 19 nt, Artificial Sequence
  synthetic
gccaggauacuaacaucag

SEQ ID NO: 219 - RNA, 19 nt, Artificial Sequence
  synthetic
ccaggauacuaacaucaga

SEQ ID NO: 220 - RNA, 19 nt, Artificial Sequence
  synthetic
caggauacuaacaucagaa

SEQ ID NO: 221 - RNA, 19 nt, Artificial Sequence
  synthetic
aggauacuaacaucagaau

SEQ ID NO: 222 - RNA, 19 nt, Artificial Sequence
  synthetic
ggauacuaacaucagaauc

SEQ ID NO: 223 - RNA, 19 nt, Artificial Sequence
  synthetic
ucagaaucacaauuaacaa

SEQ ID NO: 224 - RNA, 19 nt, Artificial Sequence
  synthetic
caauuaacaauaacuaaag

SEQ ID NO: 225 - RNA, 19 nt, Artificial Sequence
  synthetic
aauuaacaauaacuaaaga

SEQ ID NO: 226 - RNA, 19 nt, Artificial Sequence
  synthetic
auaacuaaagagaaaaaag

SEQ ID NO: 227 - RNA, 19 nt, Artificial Sequence
  synthetic
aaagaagaacuccgagauu

SEQ ID NO: 228 - RNA, 19 nt, Artificial Sequence
  synthetic
aagaagaacuccgagauug

SEQ ID NO: 229 - RNA, 19 nt, Artificial Sequence
  synthetic
agaagaacuccgagauugc

SEQ ID NO: 230 - RNA, 19 nt, Artificial Sequence
  synthetic
gaagaacuccgagauugca

SEQ ID NO: 231 - RNA, 19 nt, Artificial Sequence
  synthetic
aagaacuccgagauugcaa

SEQ ID NO: 232 - RNA, 19 nt, Artificial Sequence
  synthetic
agaacuccgagauugcaaa

SEQ ID NO: 233 - RNA, 19 nt, Artificial Sequence
  synthetic
gaacuccgagauugcaaaa

SEQ ID NO: 234 - RNA, 19 nt, Artificial Sequence
  synthetic
aacuccgagauugcaaaau

SEQ ID NO: 235 - RNA, 19 nt, Artificial Sequence
  synthetic
acuccgagauugcaaaauu

SEQ ID NO: 236 - RNA, 19 nt, Artificial Sequence
  synthetic
cuccgagauugcaaaauuu

SEQ ID NO: 237 - RNA, 19 nt, Artificial Sequence
  synthetic
uccgagauugcaaaauuuc

SEQ ID NO: 238 - RNA, 19 nt, Artificial Sequence
  synthetic
ccgagauugcaaaauuucu

SEQ ID NO: 239 - RNA, 19 nt, Artificial Sequence
  synthetic
cgagauugcaaaauuucuc

SEQ ID NO: 240 - RNA, 19 nt, Artificial Sequence
  synthetic
gagauugcaaaauuucucc

SEQ ID NO: 241 - RNA, 19 nt, Artificial Sequence
  synthetic
agauugcaaaauuucuccc

SEQ ID NO: 242 - RNA, 19 nt, Artificial Sequence
  synthetic
gauugcaaaauuucucccu

SEQ ID NO: 243 - RNA, 19 nt, Artificial Sequence
  synthetic
auugcaaaauuucucccuu

SEQ ID NO: 244 - RNA, 19 nt, Artificial Sequence
  synthetic
uugcaaaauuucucccuug

SEQ ID NO: 245 - RNA, 19 nt, Artificial Sequence
  synthetic
ugcaaaauuucucccuuga

SEQ ID NO: 246 - RNA, 19 nt, Artificial Sequence
  synthetic
gcaaaauuucucccuugau

SEQ ID NO: 247 - RNA, 19 nt, Artificial Sequence
  synthetic
caaaauuucucccuugaug

SEQ ID NO: 248 - RNA, 19 nt, Artificial Sequence
  synthetic
aaaauuucucccuugaugg

SEQ ID NO: 249 - RNA, 19 nt, Artificial Sequence
  synthetic
aaauuucucccuugauggu

SEQ ID NO: 250 - RNA, 19 nt, Artificial Sequence
  synthetic
aauuucucccuugaugguu

SEQ ID NO: 251 - RNA, 19 nt, Artificial Sequence
  synthetic
auuucucccuugaugguug

SEQ ID NO: 252 - RNA, 19 nt, Artificial Sequence
  synthetic
uuucucccuugaugguugc

SEQ ID NO: 253 - RNA, 19 nt, Artificial Sequence
  synthetic
uucucccuugaugguugca

SEQ ID NO: 254 - RNA, 19 nt, Artificial Sequence
  synthetic
ucucccuugaugguugcau

SEQ ID NO: 255 - RNA, 19 nt, Artificial Sequence
  synthetic
cucccuugaugguugcaua

SEQ ID NO: 256 - RNA, 19 nt, Artificial Sequence
  synthetic
ucccuugaugguugcauac

SEQ ID NO: 257 - RNA, 19 nt, Artificial Sequence
  synthetic
cccuugaugguugcauaca

SEQ ID NO: 258 - RNA, 19 nt, Artificial Sequence
  synthetic
ccuugaugguugcauacau

SEQ ID NO: 259 - RNA, 19 nt, Artificial Sequence
  synthetic
cuugaugguugcauacaug

SEQ ID NO: 260 - RNA, 19 nt, Artificial Sequence
  synthetic
uugaugguugcauacaugu

SEQ ID NO: 261 - RNA, 19 nt, Artificial Sequence
  synthetic
ugaugguugcauacauguu

SEQ ID NO: 262 - RNA, 19 nt, Artificial Sequence
  synthetic
gaugguugcauacauguua

SEQ ID NO: 263 - RNA, 19 nt, Artificial Sequence
  synthetic
augguugcauacauguuag

SEQ ID NO: 264 - RNA, 19 nt, Artificial Sequence
  synthetic
ugguugcauacauguuaga

SEQ ID NO: 265 - RNA, 19 nt, Artificial Sequence
  synthetic
gguugcauacauguuagag

SEQ ID NO: 266 - RNA, 19 nt, Artificial Sequence
  synthetic
guugcauacauguuagaga

SEQ ID NO: 267 - RNA, 19 nt, Artificial Sequence
  synthetic
uugcauacauguuagagag

SEQ ID NO: 268 - RNA, 19 nt, Artificial Sequence
  synthetic
ugcauacauguuagagaga

SEQ ID NO: 269 - RNA, 19 nt, Artificial Sequence
  synthetic
gcauacauguuagagagag

SEQ ID NO: 270 - RNA, 19 nt, Artificial Sequence
  synthetic
cauacauguuagagagaga

SEQ ID NO: 271 - RNA, 19 nt, Artificial Sequence
  synthetic
auacauguuagagagagaa

SEQ ID NO: 272 - RNA, 19 nt, Artificial Sequence
  synthetic
uacauguuagagagagaac

SEQ ID NO: 273 - RNA, 19 nt, Artificial Sequence
  synthetic
acauguuagagagagaacu

SEQ ID NO: 274 - RNA, 19 nt, Artificial Sequence
  synthetic
cauguuagagagagaacuu

SEQ ID NO: 275 - RNA, 19 nt, Artificial Sequence
  synthetic
auguuagagagagaacuug

SEQ ID NO: 276 - RNA, 19 nt, Artificial Sequence
  synthetic
uguuagagagagaacuugu

SEQ ID NO: 277 - RNA, 19 nt, Artificial Sequence
  synthetic
agagaacuuguccgaaaaa

SEQ ID NO: 278 - RNA, 19 nt, Artificial Sequence
  synthetic
cgaaaaacaagauuucucc

SEQ ID NO: 279 - RNA, 19 nt, Artificial Sequence
  synthetic
gaaaaacaagauuucuccc

SEQ ID NO: 280 - RNA, 19 nt, Artificial Sequence
  synthetic
aaaaacaagauuucuccca

SEQ ID NO: 281 - RNA, 19 nt, Artificial Sequence
  synthetic
aaaacaagauuucucccag

SEQ ID NO: 282 - RNA, 19 nt, Artificial Sequence
  synthetic
aaacaagauuucucccagu

SEQ ID NO: 283 - RNA, 19 nt, Artificial Sequence
  synthetic
aacaagauuucucccaguu

SEQ ID NO: 284 - RNA, 19 nt, Artificial Sequence
  synthetic
acaagauuucucccaguug

SEQ ID NO: 285 - RNA, 19 nt, Artificial Sequence
  synthetic
caagauuucucccaguugc

SEQ ID NO: 286 - RNA, 19 nt, Artificial Sequence
  synthetic
aagauuucucccaguugcu

SEQ ID NO: 287 - RNA, 19 nt, Artificial Sequence
  synthetic
agauuucucccaguugcug

SEQ ID NO: 288 - RNA, 19 nt, Artificial Sequence
  synthetic
gauuucucccaguugcugg

SEQ ID NO: 289 - RNA, 19 nt, Artificial Sequence
  synthetic
auuucucccaguugcuggc

SEQ ID NO: 290 - RNA, 19 nt, Artificial Sequence
  synthetic
uuucucccaguugcuggcg

SEQ ID NO: 291 - RNA, 19 nt, Artificial Sequence
  synthetic
uucucccaguugcuggcgg

SEQ ID NO: 292 - RNA, 19 nt, Artificial Sequence
  synthetic
ucucccaguugcuggcgga

SEQ ID NO: 293 - RNA, 19 nt, Artificial Sequence
  synthetic
cucccaguugcuggcggaa

SEQ ID NO: 294 - RNA, 19 nt, Artificial Sequence
  synthetic
ucccaguugcuggcggaac

SEQ ID NO: 295 - RNA, 19 nt, Artificial Sequence
  synthetic
cccaguugcuggcggaaca

SEQ ID NO: 296 - RNA, 19 nt, Artificial Sequence
  synthetic
ccaguugcuggcggaacaa

SEQ ID NO: 297 - RNA, 19 nt, Artificial Sequence
  synthetic
caguugcuggcggaacaag

SEQ ID NO: 298 - RNA, 19 nt, Artificial Sequence
  synthetic
aguugcuggcggaacaagc

SEQ ID NO: 299 - RNA, 19 nt, Artificial Sequence
  synthetic
guugcuggcggaacaagca

SEQ ID NO: 300 - RNA, 19 nt, Artificial Sequence
  synthetic
uugcuggcggaacaagcag

SEQ ID NO: 301 - RNA, 19 nt, Artificial Sequence
  synthetic
ugcuggcggaacaagcagu

SEQ ID NO: 302 - RNA, 19 nt, Artificial Sequence
  synthetic
gcuggcggaacaagcagua

SEQ ID NO: 303 - RNA, 19 nt, Artificial Sequence
  synthetic
cuggcggaacaagcaguau

SEQ ID NO: 304 - RNA, 19 nt, Artificial Sequence
  synthetic
uggcggaacaagcaguaua

SEQ ID NO: 305 - RNA, 19 nt, Artificial Sequence
  synthetic
ggcggaacaagcaguauau

SEQ ID NO: 306 - RNA, 19 nt, Artificial Sequence
  synthetic
gcggaacaagcaguauaua

SEQ ID NO: 307 - RNA, 19 nt, Artificial Sequence
  synthetic
cggaacaagcaguauauac

SEQ ID NO: 308 - RNA, 19 nt, Artificial Sequence
  synthetic
ggaacaagcaguauauaca

SEQ ID NO: 309 - RNA, 19 nt, Artificial Sequence
  synthetic
gaacaagcaguauauacau

SEQ ID NO: 310 - RNA, 19 nt, Artificial Sequence
  synthetic
aacaagcaguauauacauu

SEQ ID NO: 311 - RNA, 19 nt, Artificial Sequence
  synthetic
acaagcaguauauacauug

SEQ ID NO: 312 - RNA, 19 nt, Artificial Sequence
  synthetic
caagcaguauauacauuga

SEQ ID NO: 313 - RNA, 19 nt, Artificial Sequence
  synthetic
aagcaguauauacauugaa

SEQ ID NO: 314 - RNA, 19 nt, Artificial Sequence
  synthetic
agcaguauauacauugaag

SEQ ID NO: 315 - RNA, 19 nt, Artificial Sequence
  synthetic
gcaguauauacauugaagu

SEQ ID NO: 316 - RNA, 19 nt, Artificial Sequence
  synthetic
caguauauacauugaaguu

SEQ ID NO: 317 - RNA, 19 nt, Artificial Sequence
  synthetic
aguauauacauugaaguuu

SEQ ID NO: 318 - RNA, 19 nt, Artificial Sequence
  synthetic
guauauacauugaaguuuu

SEQ ID NO: 319 - RNA, 19 nt, Artificial Sequence
  synthetic
auauacauugaaguuuuac

SEQ ID NO: 320 - RNA, 19 nt, Artificial Sequence
  synthetic
cauuugacucaaggaacgu

SEQ ID NO: 321 - RNA, 19 nt, Artificial Sequence
  synthetic
caaggaacguguugggaac

SEQ ID NO: 322 - RNA, 19 nt, Artificial Sequence
  synthetic
aaggaacguguugggaaca

SEQ ID NO: 323 - RNA, 19 nt, Artificial Sequence
  synthetic
aggaacguguugggaacaa

SEQ ID NO: 324 - RNA, 19 nt, Artificial Sequence
  synthetic
ggaacguguugggaacaaa

SEQ ID NO: 325 - RNA, 19 nt, Artificial Sequence
  synthetic
gaacguguugggaacaaau

SEQ ID NO: 326 - RNA, 19 nt, Artificial Sequence
  synthetic
aacguguugggaacaaaug

SEQ ID NO: 327 - RNA, 19 nt, Artificial Sequence
  synthetic
acguguugggaacaaaugu

SEQ ID NO: 328 - RNA, 19 nt, Artificial Sequence
  synthetic
cguguugggaacaaaugua

SEQ ID NO: 329 - RNA, 19 nt, Artificial Sequence
  synthetic
guguugggaacaaauguac

SEQ ID NO: 330 - RNA, 19 nt, Artificial Sequence
  synthetic
uguugggaacaaauguaca

SEQ ID NO: 331 - RNA, 19 nt, Artificial Sequence
  synthetic
guugggaacaaauguacac

SEQ ID NO: 332 - RNA, 19 nt, Artificial Sequence
  synthetic
uugggaacaaauguacacu

SEQ ID NO: 333 - RNA, 19 nt, Artificial Sequence
  synthetic
ugggaacaaauguacacuc

SEQ ID NO: 334 - RNA, 19 nt, Artificial Sequence
  synthetic
gggaacaaauguacacucc

SEQ ID NO: 335 - RNA, 19 nt, Artificial Sequence
  synthetic
ggaacaaauguacacucca

SEQ ID NO: 336 - RNA, 19 nt, Artificial Sequence
  synthetic
gaacaaauguacacuccag

SEQ ID NO: 337 - RNA, 19 nt, Artificial Sequence
  synthetic
aacaaauguacacuccagg

SEQ ID NO: 338 - RNA, 19 nt, Artificial Sequence
  synthetic
acaaauguacacuccaggu

SEQ ID NO: 339 - RNA, 19 nt, Artificial Sequence
  synthetic
caaauguacacuccaggug

SEQ ID NO: 340 - RNA, 19 nt, Artificial Sequence
  synthetic
aaauguacacuccaggugg

SEQ ID NO: 341 - RNA, 19 nt, Artificial Sequence
  synthetic
aauguacacuccaggugga

SEQ ID NO: 342 - RNA, 19 nt, Artificial Sequence
  synthetic
auguacacuccagguggag

SEQ ID NO: 343 - RNA, 19 nt, Artificial Sequence
  synthetic
uguacacuccagguggaga

SEQ ID NO: 344 - RNA, 19 nt, Artificial Sequence
  synthetic
guacacuccagguggagaa

SEQ ID NO: 345 - RNA, 19 nt, Artificial Sequence
  synthetic
uacacuccagguggagaag

SEQ ID NO: 346 - RNA, 19 nt, Artificial Sequence
  synthetic
acacuccagguggagaagu

SEQ ID NO: 347 - RNA, 19 nt, Artificial Sequence
  synthetic
cacuccagguggagaagug

SEQ ID NO: 348 - RNA, 19 nt, Artificial Sequence
  synthetic
acuccagguggagaaguga

SEQ ID NO: 349 - RNA, 19 nt, Artificial Sequence
  synthetic
cuccagguggagaagugag

SEQ ID NO: 350 - RNA, 19 nt, Artificial Sequence
  synthetic
uccagguggagaagugagg

SEQ ID NO: 351 - RNA, 19 nt, Artificial Sequence
  synthetic
ccagguggagaagugagga

SEQ ID NO: 352 - RNA, 19 nt, Artificial Sequence
  synthetic
cagguggagaagugaggaa

SEQ ID NO: 353 - RNA, 19 nt, Artificial Sequence
  synthetic
agguggagaagugaggaau

SEQ ID NO: 354 - RNA, 19 nt, Artificial Sequence
  synthetic
gguggagaagugaggaaug

SEQ ID NO: 355 - RNA, 19 nt, Artificial Sequence
  synthetic
guggagaagugaggaauga

SEQ ID NO: 356 - RNA, 19 nt, Artificial Sequence
  synthetic
uggagaagugaggaaugac

SEQ ID NO: 357 - RNA, 19 nt, Artificial Sequence
  synthetic
ggagaagugaggaaugacg

SEQ ID NO: 358 - RNA, 19 nt, Artificial Sequence
  synthetic
gagaagugaggaaugacga

SEQ ID NO: 359 - RNA, 19 nt, Artificial Sequence
  synthetic
agaagugaggaaugacgau

SEQ ID NO: 360 - RNA, 19 nt, Artificial Sequence
  synthetic
gaagugaggaaugacgaug

SEQ ID NO: 361 - RNA, 19 nt, Artificial Sequence
  synthetic
aagugaggaaugacgaugu

SEQ ID NO: 362 - RNA, 19 nt, Artificial Sequence
  synthetic
agugaggaaugacgauguu

SEQ ID NO: 363 - RNA, 19 nt, Artificial Sequence
  synthetic
gugaggaaugacgauguug

SEQ ID NO: 364 - RNA, 19 nt, Artificial Sequence
  synthetic
ugaggaaugacgauguuga

SEQ ID NO: 365 - RNA, 19 nt, Artificial Sequence
  synthetic
aggaaugacgauguugacc

SEQ ID NO: 366 - RNA, 19 nt, Artificial Sequence
  synthetic
caaagccuaauuauugcag

SEQ ID NO: 367 - RNA, 19 nt, Artificial Sequence
  synthetic
gccaggaacauaguaagaa

SEQ ID NO: 368 - RNA, 19 nt, Artificial Sequence
  synthetic
aggaacauaguaagaagag

SEQ ID NO: 369 - RNA, 19 nt, Artificial Sequence
  synthetic
ggaacauaguaagaagagc

SEQ ID NO: 370 - RNA, 19 nt, Artificial Sequence
  synthetic
agagccgcaguaucagcag

SEQ ID NO: 371 - RNA, 19 nt, Artificial Sequence
  synthetic
gauccacuagcaucuuuau

SEQ ID NO: 372 - RNA, 19 nt, Artificial Sequence
  synthetic
ccacuagcaucuuuauugg

SEQ ID NO: 373 - RNA, 19 nt, Artificial Sequence
  synthetic
cacuagcaucuuuauugga

SEQ ID NO: 374 - RNA, 19 nt, Artificial Sequence
  synthetic
acuagcaucuuuauuggag

SEQ ID NO: 375 - RNA, 19 nt, Artificial Sequence
  synthetic
cuagcaucuuuauuggaga

SEQ ID NO: 376 - RNA, 19 nt, Artificial Sequence
  synthetic
uagcaucuuuauuggagau

SEQ ID NO: 377 - RNA, 19 nt, Artificial Sequence
  synthetic
agcaucuuuauuggagaug

SEQ ID NO: 378 - RNA, 19 nt, Artificial Sequence
  synthetic
gcaucuuuauuggagaugu

SEQ ID NO: 379 - RNA, 19 nt, Artificial Sequence
  synthetic
caucuuuauuggagaugug

SEQ ID NO: 380 - RNA, 19 nt, Artificial Sequence
  synthetic
aucuuuauuggagaugugc

SEQ ID NO: 381 - RNA, 19 nt, Artificial Sequence
  synthetic
ucuuuauuggagaugugcc

SEQ ID NO: 382 - RNA, 19 nt, Artificial Sequence
  synthetic
cuuuauuggagaugugcca

SEQ ID NO: 383 - RNA, 19 nt, Artificial Sequence
  synthetic
uuuauuggagaugugccac

SEQ ID NO: 384 - RNA, 19 nt, Artificial Sequence
  synthetic
uuauuggagaugugccaca

SEQ ID NO: 385 - RNA, 19 nt, Artificial Sequence
  synthetic
uauuggagaugugccacag

SEQ ID NO: 386 - RNA, 19 nt, Artificial Sequence
  synthetic
auuggagaugugccacagc

SEQ ID NO: 387 - RNA, 19 nt, Artificial Sequence
  synthetic
uuggagaugugccacagca

SEQ ID NO: 388 - RNA, 19 nt, Artificial Sequence
  synthetic
uggagaugugccacagcac

SEQ ID NO: 389 - RNA, 19 nt, Artificial Sequence
  synthetic
ggagaugugccacagcaca

SEQ ID NO: 390 - RNA, 19 nt, Artificial Sequence
  synthetic
gagaugugccacagcacac

SEQ ID NO: 391 - RNA, 19 nt, Artificial Sequence
  synthetic
agaugugccacagcacaca

SEQ ID NO: 392 - RNA, 19 nt, Artificial Sequence
  synthetic
gaugugccacagcacacaa

SEQ ID NO: 393 - RNA, 19 nt, Artificial Sequence
  synthetic
augugccacagcacacaaa

SEQ ID NO: 394 - RNA, 19 nt, Artificial Sequence
  synthetic
ugugccacagcacacaaau

SEQ ID NO: 395 - RNA, 19 nt, Artificial Sequence
  synthetic
gugccacagcacacaaauu

SEQ ID NO: 396 - RNA, 19 nt, Artificial Sequence
  synthetic
ugccacagcacacaaauug

SEQ ID NO: 397 - RNA, 19 nt, Artificial Sequence
  synthetic
gccacagcacacaaauugg

SEQ ID NO: 398 - RNA, 19 nt, Artificial Sequence
  synthetic
ccacagcacacaaauuggc

SEQ ID NO: 399 - RNA, 19 nt, Artificial Sequence
  synthetic
cacagcacacaaauuggcg

SEQ ID NO: 400 - RNA, 19 nt, Artificial Sequence
  synthetic
acagcacacaaauuggcgg

SEQ ID NO: 401 - RNA, 19 nt, Artificial Sequence
  synthetic
cagcacacaaauuggcggg

SEQ ID NO: 402 - RNA, 19 nt, Artificial Sequence
  synthetic
agcacacaaauuggcggga

SEQ ID NO: 403 - RNA, 19 nt, Artificial Sequence
  synthetic
gcacacaaauuggcgggac

SEQ ID NO: 404 - RNA, 19 nt, Artificial Sequence
  synthetic
cacacaaauuggcgggaca

SEQ ID NO: 405 - RNA, 19 nt, Artificial Sequence
  synthetic
acacaaauuggcgggacaa

SEQ ID NO: 406 - RNA, 19 nt, Artificial Sequence
  synthetic
aggaugguggacauucuua

SEQ ID NO: 407 - RNA, 19 nt, Artificial Sequence
  synthetic
aggcagaacccgacugaag

SEQ ID NO: 408 - RNA, 19 nt, Artificial Sequence
  synthetic
acugaagaacaagcugugg

SEQ ID NO: 409 - RNA, 19 nt, Artificial Sequence
  synthetic
cugaagaacaagcugugga

SEQ ID NO: 410 - RNA, 19 nt, Artificial Sequence
  synthetic
ugaagaacaagcuguggau

SEQ ID NO: 411 - RNA, 19 nt, Artificial Sequence
  synthetic
gaagaacaagcuguggaua

SEQ ID NO: 412 - RNA, 19 nt, Artificial Sequence
  synthetic
aagaacaagcuguggauau

SEQ ID NO: 413 - RNA, 19 nt, Artificial Sequence
  synthetic
agaacaagcuguggauaua

SEQ ID NO: 414 - RNA, 19 nt, Artificial Sequence
  synthetic
gaacaagcuguggauauau

SEQ ID NO: 415 - RNA, 19 nt, Artificial Sequence
  synthetic
aacaagcuguggauauaug

SEQ ID NO: 416 - RNA, 19 nt, Artificial Sequence
  synthetic
acaagcuguggauauaugc

SEQ ID NO: 417 - RNA, 19 nt, Artificial Sequence
  synthetic
caagcuguggauauaugca

SEQ ID NO: 418 - RNA, 19 nt, Artificial Sequence
  synthetic
aagcuguggauauaugcaa

SEQ ID NO: 419 - RNA, 19 nt, Artificial Sequence
  synthetic
agcuguggauauaugcaag

SEQ ID NO: 420 - RNA, 19 nt, Artificial Sequence
  synthetic
gcuguggauauaugcaagg

SEQ ID NO: 421 - RNA, 19 nt, Artificial Sequence
  synthetic
cuguggauauaugcaaggc

SEQ ID NO: 422 - RNA, 19 nt, Artificial Sequence
  synthetic
uguggauauaugcaaggcu

SEQ ID NO: 423 - RNA, 19 nt, Artificial Sequence
  synthetic
guggauauaugcaaggcug

SEQ ID NO: 424 - RNA, 19 nt, Artificial Sequence
  synthetic
uggauauaugcaaggcugc

SEQ ID NO: 425 - RNA, 19 nt, Artificial Sequence
  synthetic
ggauauaugcaaggcugca

SEQ ID NO: 426 - RNA, 19 nt, Artificial Sequence
  synthetic
gauauaugcaaggcugcaa

SEQ ID NO: 427 - RNA, 19 nt, Artificial Sequence
  synthetic
auauaugcaaggcugcaau

SEQ ID NO: 428 - RNA, 19 nt, Artificial Sequence
  synthetic
uauaugcaaggcugcaaug

SEQ ID NO: 429 - RNA, 19 nt, Artificial Sequence
  synthetic
auaugcaaggcugcaaugg

SEQ ID NO: 430 - RNA, 19 nt, Artificial Sequence
  synthetic
uaugcaaggcugcaauggg

SEQ ID NO: 431 - RNA, 19 nt, Artificial Sequence
  synthetic
ugcaaggcugcaauggggu

SEQ ID NO: 432 - RNA, 19 nt, Artificial Sequence
  synthetic
uugagaaucagcucauccu

SEQ ID NO: 433 - RNA, 19 nt, Artificial Sequence
  synthetic
ugagaaucagcucauccuu

SEQ ID NO: 434 - RNA, 19 nt, Artificial Sequence
  synthetic
gagaaucagcucauccuuc

SEQ ID NO: 435 - RNA, 19 nt, Artificial Sequence
  synthetic
agaaucagcucauccuuca

SEQ ID NO: 436 - RNA, 19 nt, Artificial Sequence
  synthetic
gaaucagcucauccuucag

SEQ ID NO: 437 - RNA, 19 nt, Artificial Sequence
  synthetic
aaucagcucauccuucagc

SEQ ID NO: 438 - RNA, 19 nt, Artificial Sequence
  synthetic
aucagcucauccuucagcu

SEQ ID NO: 439 - RNA, 19 nt, Artificial Sequence
  synthetic
ucagcucauccuucagcuu

SEQ ID NO: 440 - RNA, 19 nt, Artificial Sequence
  synthetic
cagcucauccuucagcuuu

SEQ ID NO: 441 - RNA, 19 nt, Artificial Sequence
  synthetic
agcucauccuucagcuuug

SEQ ID NO: 442 - RNA, 19 nt, Artificial Sequence
  synthetic
gcucauccuucagcuuugg

SEQ ID NO: 443 - RNA, 19 nt, Artificial Sequence
  synthetic
cucauccuucagcuuuggu

SEQ ID NO: 444 - RNA, 19 nt, Artificial Sequence
  synthetic
ucauccuucagcuuuggug

SEQ ID NO: 445 - RNA, 19 nt, Artificial Sequence
  synthetic
cauccuucagcuuuggugg

SEQ ID NO: 446 - RNA, 19 nt, Artificial Sequence
  synthetic
uucagcuuugguggauuua

SEQ ID NO: 447 - RNA, 19 nt, Artificial Sequence
  synthetic
acauuuaaaagaacaagcg

SEQ ID NO: 448 - RNA, 19 nt, Artificial Sequence
  synthetic
gggucaucagucaaaagag

SEQ ID NO: 449 - RNA, 19 nt, Artificial Sequence
  synthetic
gaggaagaagugcuuacag

SEQ ID NO: 450 - RNA, 19 nt, Artificial Sequence
  synthetic
gaagaagugcuuacaggca

SEQ ID NO: 451 - RNA, 19 nt, Artificial Sequence
  synthetic
aagaagugcuuacaggcaa

SEQ ID NO: 452 - RNA, 19 nt, Artificial Sequence
  synthetic
agaagugcuuacaggcaau

SEQ ID NO: 453 - RNA, 19 nt, Artificial Sequence
  synthetic
gaagugcuuacaggcaauc

SEQ ID NO: 454 - RNA, 19 nt, Artificial Sequence
  synthetic
aagugcuuacaggcaaucu

SEQ ID NO: 455 - RNA, 19 nt, Artificial Sequence
  synthetic
agugcuuacaggcaaucuc

SEQ ID NO: 456 - RNA, 19 nt, Artificial Sequence
  synthetic
gugcuuacaggcaaucucc

SEQ ID NO: 457 - RNA, 19 nt, Artificial Sequence
  synthetic
ugcuuacaggcaaucucca

SEQ ID NO: 458 - RNA, 19 nt, Artificial Sequence
  synthetic
gcuuacaggcaaucuccaa

SEQ ID NO: 459 - RNA, 19 nt, Artificial Sequence
  synthetic
cuuacaggcaaucuccaaa

SEQ ID NO: 460 - RNA, 19 nt, Artificial Sequence
  synthetic
uuacaggcaaucuccaaac

SEQ ID NO: 461 - RNA, 19 nt, Artificial Sequence
  synthetic
uacaggcaaucuccaaaca

SEQ ID NO: 462 - RNA, 19 nt, Artificial Sequence
  synthetic
acaggcaaucuccaaacau

SEQ ID NO: 463 - RNA, 19 nt, Artificial Sequence
  synthetic
caggcaaucuccaaacauu

SEQ ID NO: 464 - RNA, 19 nt, Artificial Sequence
  synthetic
aggcaaucuccaaacauug

SEQ ID NO: 465 - RNA, 19 nt, Artificial Sequence
  synthetic
ggcaaucuccaaacauuga

SEQ ID NO: 466 - RNA, 19 nt, Artificial Sequence
  synthetic
gcaaucuccaaacauugaa

SEQ ID NO: 467 - RNA, 19 nt, Artificial Sequence
  synthetic
aaaauaagaguacaugagg

SEQ ID NO: 468 - RNA, 19 nt, Artificial Sequence
  synthetic
ggguaugaggaguucacaa

SEQ ID NO: 469 - RNA, 19 nt, Artificial Sequence
  synthetic
uaugaggaguucacaaugg

SEQ ID NO: 470 - RNA, 19 nt, Artificial Sequence
  synthetic
augaggaguucacaauggu

SEQ ID NO: 471 - RNA, 19 nt, Artificial Sequence
  synthetic
ugaggaguucacaauggug

SEQ ID NO: 472 - RNA, 19 nt, Artificial Sequence
  synthetic
gaggaguucacaauggugg

SEQ ID NO: 473 - RNA, 19 nt, Artificial Sequence
  synthetic
aggaguucacaaugguggg

SEQ ID NO: 474 - RNA, 19 nt, Artificial Sequence
  synthetic
uucacaaugguggggaaaa

SEQ ID NO: 475 - RNA, 19 nt, Artificial Sequence
  synthetic
ucacaaugguggggaaaag

SEQ ID NO: 476 - RNA, 19 nt, Artificial Sequence
  synthetic
augguggggaaaagagcaa

SEQ ID NO: 477 - RNA, 19 nt, Artificial Sequence
  synthetic
ugguggggaaaagagcaac

SEQ ID NO: 478 - RNA, 19 nt, Artificial Sequence
  synthetic
gguggggaaaagagcaaca

SEQ ID NO: 479 - RNA, 19 nt, Artificial Sequence
  synthetic
guggggaaaagagcaacag

SEQ ID NO: 480 - RNA, 19 nt, Artificial Sequence
  synthetic
uggggaaaagagcaacagc

SEQ ID NO: 481 - RNA, 19 nt, Artificial Sequence
  synthetic
ggggaaaagagcaacagcu

SEQ ID NO: 482 - RNA, 19 nt, Artificial Sequence
  synthetic
gggaaaagagcaacagcua

SEQ ID NO: 483 - RNA, 19 nt, Artificial Sequence
  synthetic
ggaaaagagcaacagcuau

SEQ ID NO: 484 - RNA, 19 nt, Artificial Sequence
  synthetic
gaaaagagcaacagcuaua

SEQ ID NO: 485 - RNA, 19 nt, Artificial Sequence
  synthetic
aaaagagcaacagcuauac

SEQ ID NO: 486 - RNA, 19 nt, Artificial Sequence
  synthetic
aaagagcaacagcuauacu

SEQ ID NO: 487 - RNA, 19 nt, Artificial Sequence
  synthetic
acagcuauacucagaaaag

SEQ ID NO: 488 - RNA, 19 nt, Artificial Sequence
  synthetic
gcaaccaggagauugguuc

SEQ ID NO: 489 - RNA, 19 nt, Artificial Sequence
  synthetic
cagcucauagugaguggaa

SEQ ID NO: 490 - RNA, 19 nt, Artificial Sequence
  synthetic
agggacgaacagucaauag

SEQ ID NO: 491 - RNA, 19 nt, Artificial Sequence
  synthetic
gccgaagcaauaaucgugg

SEQ ID NO: 492 - RNA, 19 nt, Artificial Sequence
  synthetic
guggccaugguguuuucac

SEQ ID NO: 493 - RNA, 19 nt, Artificial Sequence
  synthetic
uggccaugguguuuucaca

SEQ ID NO: 494 - RNA, 19 nt, Artificial Sequence
  synthetic
ggccaugguguuuucacaa

SEQ ID NO: 495 - RNA, 19 nt, Artificial Sequence
  synthetic
gccaugguguuuucacaag

SEQ ID NO: 496 - RNA, 19 nt, Artificial Sequence
  synthetic
ccaugguguuuucacaaga

SEQ ID NO: 497 - RNA, 19 nt, Artificial Sequence
  synthetic
caugguguuuucacaagag

SEQ ID NO: 498 - RNA, 19 nt, Artificial Sequence
  synthetic
augguguuuucacaagagg

SEQ ID NO: 499 - RNA, 19 nt, Artificial Sequence
  synthetic
ugguguuuucacaagagga

SEQ ID NO: 500 - RNA, 19 nt, Artificial Sequence
  synthetic
gguguuuucacaagaggau

SEQ ID NO: 501 - RNA, 19 nt, Artificial Sequence
  synthetic
guguuuucacaagaggauu

SEQ ID NO: 502 - RNA, 19 nt, Artificial Sequence
  synthetic
uguuuucacaagaggauug

SEQ ID NO: 503 - RNA, 19 nt, Artificial Sequence
  synthetic
guuuucacaagaggauugc

SEQ ID NO: 504 - RNA, 19 nt, Artificial Sequence
  synthetic
uuuucacaagaggauugca

SEQ ID NO: 505 - RNA, 19 nt, Artificial Sequence
  synthetic
uuucacaagaggauugcau

SEQ ID NO: 506 - RNA, 19 nt, Artificial Sequence
  synthetic
uucacaagaggauugcaug

SEQ ID NO: 507 - RNA, 19 nt, Artificial Sequence
  synthetic
ucacaagaggauugcauga

SEQ ID NO: 508 - RNA, 19 nt, Artificial Sequence
  synthetic
cacaagaggauugcaugau

SEQ ID NO: 509 - RNA, 19 nt, Artificial Sequence
  synthetic
acaagaggauugcaugaua

SEQ ID NO: 510 - RNA, 19 nt, Artificial Sequence
  synthetic
caagaggauugcaugauaa

SEQ ID NO: 511 - RNA, 19 nt, Artificial Sequence
  synthetic
aagaggauugcaugauaaa

SEQ ID NO: 512 - RNA, 19 nt, Artificial Sequence
  synthetic
agaggauugcaugauaaaa

SEQ ID NO: 513 - RNA, 19 nt, Artificial Sequence
  synthetic
gaggauugcaugauaaaag

SEQ ID NO: 514 - RNA, 19 nt, Artificial Sequence
  synthetic
aggauugcaugauaaaagc

SEQ ID NO: 515 - RNA, 19 nt, Artificial Sequence
  synthetic
ggauugcaugauaaaagca

SEQ ID NO: 516 - RNA, 19 nt, Artificial Sequence
  synthetic
gauugcaugauaaaagcag

SEQ ID NO: 517 - RNA, 19 nt, Artificial Sequence
  synthetic
auugcaugauaaaagcagu

SEQ ID NO: 518 - RNA, 19 nt, Artificial Sequence
  synthetic
uugcaugauaaaagcaguu

SEQ ID NO: 519 - RNA, 19 nt, Artificial Sequence
  synthetic
ugcaugauaaaagcaguua

SEQ ID NO: 520 - RNA, 19 nt, Artificial Sequence
  synthetic
gcaugauaaaagcaguuag

SEQ ID NO: 521 - RNA, 19 nt, Artificial Sequence
  synthetic
caugauaaaagcaguuaga

SEQ ID NO: 522 - RNA, 19 nt, Artificial Sequence
  synthetic
augauaaaagcaguuagag

SEQ ID NO: 523 - RNA, 19 nt, Artificial Sequence
  synthetic
ugauaaaagcaguuagagg

SEQ ID NO: 524 - RNA, 19 nt, Artificial Sequence
  synthetic
gauaaaagcaguuagaggu

SEQ ID NO: 525 - RNA, 19 nt, Artificial Sequence
  synthetic
auaaaagcaguuagaggug

SEQ ID NO: 526 - RNA, 19 nt, Artificial Sequence
  synthetic
uaaaagcaguuagagguga

SEQ ID NO: 527 - RNA, 19 nt, Artificial Sequence
  synthetic
aaaagcaguuagaggugac

SEQ ID NO: 528 - RNA, 19 nt, Artificial Sequence
  synthetic
aaagcaguuagaggugacc

SEQ ID NO: 529 - RNA, 19 nt, Artificial Sequence
  synthetic
aagcaguuagaggugaccu

SEQ ID NO: 530 - RNA, 19 nt, Artificial Sequence
  synthetic
agcaguuagaggugaccug

SEQ ID NO: 531 - RNA, 19 nt, Artificial Sequence
  synthetic
gcaguuagaggugaccuga

SEQ ID NO: 532 - RNA, 19 nt, Artificial Sequence
  synthetic
caguuagaggugaccugaa

SEQ ID NO: 533 - RNA, 19 nt, Artificial Sequence
  synthetic
aguuagaggugaccugaau

SEQ ID NO: 534 - RNA, 19 nt, Artificial Sequence
  synthetic
guuagaggugaccugaauu

SEQ ID NO: 535 - RNA, 19 nt, Artificial Sequence
  synthetic
uuagaggugaccugaauuu

SEQ ID NO: 536 - RNA, 19 nt, Artificial Sequence
  synthetic
uagaggugaccugaauuuc

SEQ ID NO: 537 - RNA, 19 nt, Artificial Sequence
  synthetic
agaggugaccugaauuucg

SEQ ID NO: 538 - RNA, 19 nt, Artificial Sequence
  synthetic
gaggugaccugaauuucgu

SEQ ID NO: 539 - RNA, 19 nt, Artificial Sequence
  synthetic
aggugaccugaauuucguc

SEQ ID NO: 540 - RNA, 19 nt, Artificial Sequence
  synthetic
ggugaccugaauuucguca

SEQ ID NO: 541 - RNA, 19 nt, Artificial Sequence
  synthetic
gugaccugaauuucgucaa

SEQ ID NO: 542 - RNA, 19 nt, Artificial Sequence
  synthetic
ugaccugaauuucgucaac

SEQ ID NO: 543 - RNA, 19 nt, Artificial Sequence
  synthetic
gaccugaauuucgucaaca

SEQ ID NO: 544 - RNA, 19 nt, Artificial Sequence
  synthetic
accugaauuucgucaacag

SEQ ID NO: 545 - RNA, 19 nt, Artificial Sequence
  synthetic
aauuucgucaacagggcaa

SEQ ID NO: 546 - RNA, 19 nt, Artificial Sequence
  synthetic
aaccagcgguugaacccca

SEQ ID NO: 547 - RNA, 19 nt, Artificial Sequence
  synthetic
augcaucagcuuuuaaggc

SEQ ID NO: 548 - RNA, 19 nt, Artificial Sequence
  synthetic
cuuuuaaggcauuuucaga

SEQ ID NO: 549 - RNA, 19 nt, Artificial Sequence
  synthetic
uuuuaaggcauuuucagaa

SEQ ID NO: 550 - RNA, 19 nt, Artificial Sequence
  synthetic
uuuaaggcauuuucagaaa

SEQ ID NO: 551 - RNA, 19 nt, Artificial Sequence
  synthetic
uuaaggcauuuucagaaag

SEQ ID NO: 552 - RNA, 19 nt, Artificial Sequence
  synthetic
uaaggcauuuucagaaaga

SEQ ID NO: 553 - RNA, 19 nt, Artificial Sequence
  synthetic
aaggcauuuucagaaagau

SEQ ID NO: 554 - RNA, 19 nt, Artificial Sequence
  synthetic
aggcauuuucagaaagaug

SEQ ID NO: 555 - RNA, 19 nt, Artificial Sequence
  synthetic
ggcauuuucagaaagaugc

SEQ ID NO: 556 - RNA, 19 nt, Artificial Sequence
  synthetic
cauuuucagaaagaugcga

SEQ ID NO: 557 - RNA, 19 nt, Artificial Sequence
  synthetic
aaagugcuuuuucagaauu

SEQ ID NO: 558 - RNA, 19 nt, Artificial Sequence
  synthetic
uggggaauugaacacaucg

SEQ ID NO: 559 - RNA, 19 nt, Artificial Sequence
  synthetic
gacagugugaugggaaugg

SEQ ID NO: 560 - RNA, 19 nt, Artificial Sequence
  synthetic
guuggaguauuaccagaua

SEQ ID NO: 561 - RNA, 19 nt, Artificial Sequence
  synthetic
uuggaguauuaccagauau

SEQ ID NO: 562 - RNA, 19 nt, Artificial Sequence
  synthetic
uggaguauuaccagauaug

SEQ ID NO: 563 - RNA, 19 nt, Artificial Sequence
  synthetic
ggaguauuaccagauauga

SEQ ID NO: 564 - RNA, 19 nt, Artificial Sequence
  synthetic
gaguauuaccagauaugac

SEQ ID NO: 565 - RNA, 19 nt, Artificial Sequence
  synthetic
uauuaccagauaugacucc

SEQ ID NO: 566 - RNA, 19 nt, Artificial Sequence
  synthetic
auuaccagauaugacucca

SEQ ID NO: 567 - RNA, 19 nt, Artificial Sequence
  synthetic
uuaccagauaugacuccaa

SEQ ID NO: 568 - RNA, 19 nt, Artificial Sequence
  synthetic
uaccagauaugacuccaag

SEQ ID NO: 569 - RNA, 19 nt, Artificial Sequence
  synthetic
accagauaugacuccaagc

SEQ ID NO: 570 - RNA, 19 nt, Artificial Sequence
  synthetic
ccagauaugacuccaagca

SEQ ID NO: 571 - RNA, 19 nt, Artificial Sequence
  synthetic
cagauaugacuccaagcac

SEQ ID NO: 572 - RNA, 19 nt, Artificial Sequence
  synthetic
agauaugacuccaagcaca

SEQ ID NO: 573 - RNA, 19 nt, Artificial Sequence
  synthetic
gauaugacuccaagcacag

SEQ ID NO: 574 - RNA, 19 nt, Artificial Sequence
  synthetic
auaugacuccaagcacaga

SEQ ID NO: 575 - RNA, 19 nt, Artificial Sequence
  synthetic
augacuccaagcacagaga

SEQ ID NO: 576 - RNA, 19 nt, Artificial Sequence
  synthetic
ugacuccaagcacagagau

SEQ ID NO: 577 - RNA, 19 nt, Artificial Sequence
  synthetic
gacuccaagcacagagaug

SEQ ID NO: 578 - RNA, 19 nt, Artificial Sequence
  synthetic
acuccaagcacagagaugu

SEQ ID NO: 579 - RNA, 19 nt, Artificial Sequence
  synthetic
cuccaagcacagagauguc

SEQ ID NO: 580 - RNA, 19 nt, Artificial Sequence
  synthetic
uccaagcacagagauguca

SEQ ID NO: 581 - RNA, 19 nt, Artificial Sequence
  synthetic
ccaagcacagagaugucaa

SEQ ID NO: 582 - RNA, 19 nt, Artificial Sequence
  synthetic
caagcacagagaugucaau

SEQ ID NO: 583 - RNA, 19 nt, Artificial Sequence
  synthetic
aagcacagagaugucaaug

SEQ ID NO: 584 - RNA, 19 nt, Artificial Sequence
  synthetic
agcacagagaugucaauga

SEQ ID NO: 585 - RNA, 19 nt, Artificial Sequence
  synthetic
gcacagagaugucaaugag

SEQ ID NO: 586 - RNA, 19 nt, Artificial Sequence
  synthetic
cacagagaugucaaugaga

SEQ ID NO: 587 - RNA, 19 nt, Artificial Sequence
  synthetic
acagagaugucaaugagag

SEQ ID NO: 588 - RNA, 19 nt, Artificial Sequence
  synthetic
cagagaugucaaugagagg

SEQ ID NO: 589 - RNA, 19 nt, Artificial Sequence
  synthetic
agagaugucaaugagagga

SEQ ID NO: 590 - RNA, 19 nt, Artificial Sequence
  synthetic
gagaugucaaugagaggaa

SEQ ID NO: 591 - RNA, 19 nt, Artificial Sequence
  synthetic
agaugucaaugagaggaau

SEQ ID NO: 592 - RNA, 19 nt, Artificial Sequence
  synthetic
gaugucaaugagaggaaua

SEQ ID NO: 593 - RNA, 19 nt, Artificial Sequence
  synthetic
augucaaugagaggaauaa

SEQ ID NO: 594 - RNA, 19 nt, Artificial Sequence
  synthetic
ugucaaugagaggaauaag

SEQ ID NO: 595 - RNA, 19 nt, Artificial Sequence
  synthetic
gucaaugagaggaauaaga

SEQ ID NO: 596 - RNA, 19 nt, Artificial Sequence
  synthetic
ucaaugagaggaauaagag

SEQ ID NO: 597 - RNA, 19 nt, Artificial Sequence
  synthetic
caaugagaggaauaagagu

SEQ ID NO: 598 - RNA, 19 nt, Artificial Sequence
  synthetic
aaugagaggaauaagaguc

SEQ ID NO: 599 - RNA, 19 nt, Artificial Sequence
  synthetic
augagaggaauaagaguca

SEQ ID NO: 600 - RNA, 19 nt, Artificial Sequence
  synthetic
ugagaggaauaagagucag

SEQ ID NO: 601 - RNA, 19 nt, Artificial Sequence
  synthetic
gagaggaauaagagucagc

SEQ ID NO: 602 - RNA, 19 nt, Artificial Sequence
  synthetic
agaggaauaagagucagca

SEQ ID NO: 603 - RNA, 19 nt, Artificial Sequence
  synthetic
gaggaauaagagucagcaa

SEQ ID NO: 604 - RNA, 19 nt, Artificial Sequence
  synthetic
aggaauaagagucagcaaa

SEQ ID NO: 605 - RNA, 19 nt, Artificial Sequence
  synthetic
ggaauaagagucagcaaaa

SEQ ID NO: 606 - RNA, 19 nt, Artificial Sequence
  synthetic
gaauaagagucagcaaaau

SEQ ID NO: 607 - RNA, 19 nt, Artificial Sequence
  synthetic
aauaagagucagcaaaaug

SEQ ID NO: 608 - RNA, 19 nt, Artificial Sequence
  synthetic
auaagagucagcaaaaugg

SEQ ID NO: 609 - RNA, 19 nt, Artificial Sequence
  synthetic
uaagagucagcaaaauggg

SEQ ID NO: 610 - RNA, 19 nt, Artificial Sequence
  synthetic
aagagucagcaaaaugggu

SEQ ID NO: 611 - RNA, 19 nt, Artificial Sequence
  synthetic
agagucagcaaaaugggug

SEQ ID NO: 612 - RNA, 19 nt, Artificial Sequence
  synthetic
gagucagcaaaaugggugu

SEQ ID NO: 613 - RNA, 19 nt, Artificial Sequence
  synthetic
agucagcaaaaugggugug

SEQ ID NO: 614 - RNA, 19 nt, Artificial Sequence
  synthetic
gucagcaaaaugggugugg

SEQ ID NO: 615 - RNA, 19 nt, Artificial Sequence
  synthetic
ucagcaaaaugggugugga

SEQ ID NO: 616 - RNA, 19 nt, Artificial Sequence
  synthetic
cagcaaaauggguguggau

SEQ ID NO: 617 - RNA, 19 nt, Artificial Sequence
  synthetic
agcaaaauggguguggaug

SEQ ID NO: 618 - RNA, 19 nt, Artificial Sequence
  synthetic
gcaaaauggguguggauga

SEQ ID NO: 619 - RNA, 19 nt, Artificial Sequence
  synthetic
caaaauggguguggaugaa

SEQ ID NO: 620 - RNA, 19 nt, Artificial Sequence
  synthetic
aaaauggguguggaugaau

SEQ ID NO: 621 - RNA, 19 nt, Artificial Sequence
  synthetic
aaauggguguggaugaaua

SEQ ID NO: 622 - RNA, 19 nt, Artificial Sequence
  synthetic
aauggguguggaugaauac

SEQ ID NO: 623 - RNA, 19 nt, Artificial Sequence
  synthetic
auggguguggaugaauacu

SEQ ID NO: 624 - RNA, 19 nt, Artificial Sequence
  synthetic
uggguguggaugaauacuc

SEQ ID NO: 625 - RNA, 19 nt, Artificial Sequence
  synthetic
ggguguggaugaauacucc

SEQ ID NO: 626 - RNA, 19 nt, Artificial Sequence
  synthetic
gguguggaugaauacucca

SEQ ID NO: 627 - RNA, 19 nt, Artificial Sequence
  synthetic
guguggaugaauacuccag

SEQ ID NO: 628 - RNA, 19 nt, Artificial Sequence
  synthetic
uguggaugaauacuccagu

SEQ ID NO: 629 - RNA, 19 nt, Artificial Sequence
  synthetic
guggaugaauacuccagua

SEQ ID NO: 630 - RNA, 19 nt, Artificial Sequence
  synthetic
uggaugaauacuccaguac

SEQ ID NO: 631 - RNA, 19 nt, Artificial Sequence
  synthetic
ggaugaauacuccaguaca

SEQ ID NO: 632 - RNA, 19 nt, Artificial Sequence
  synthetic
gaugaauacuccaguacag

SEQ ID NO: 633 - RNA, 19 nt, Artificial Sequence
  synthetic
augaauacuccaguacaga

SEQ ID NO: 634 - RNA, 19 nt, Artificial Sequence
  synthetic
ugaauacuccaguacagag

SEQ ID NO: 635 - RNA, 19 nt, Artificial Sequence
  synthetic
gaauacuccaguacagaga

SEQ ID NO: 636 - RNA, 19 nt, Artificial Sequence
  synthetic
aauacuccaguacagagag

SEQ ID NO: 637 - RNA, 19 nt, Artificial Sequence
  synthetic
acagagaggguggugguua

SEQ ID NO: 638 - RNA, 19 nt, Artificial Sequence
  synthetic
agcauugaucgguuuuuga

SEQ ID NO: 639 - RNA, 19 nt, Artificial Sequence
  synthetic
uuuuugagaguucgagacc

SEQ ID NO: 640 - RNA, 19 nt, Artificial Sequence
  synthetic
uuuugagaguucgagacca

SEQ ID NO: 641 - RNA, 19 nt, Artificial Sequence
  synthetic
uuugagaguucgagaccaa

SEQ ID NO: 642 - RNA, 19 nt, Artificial Sequence
  synthetic
agaguucgagaccaacgug

SEQ ID NO: 643 - RNA, 19 nt, Artificial Sequence
  synthetic
gggaauguauuauuaucuc

SEQ ID NO: 644 - RNA, 19 nt, Artificial Sequence
  synthetic
uaucuccugaggaggucag

SEQ ID NO: 645 - RNA, 19 nt, Artificial Sequence
  synthetic
aucuccugaggaggucagu

SEQ ID NO: 646 - RNA, 19 nt, Artificial Sequence
  synthetic
ucuccugaggaggucagug

SEQ ID NO: 647 - RNA, 19 nt, Artificial Sequence
  synthetic
cuccugaggaggucaguga

SEQ ID NO: 648 - RNA, 19 nt, Artificial Sequence
  synthetic
uccugaggaggucagugaa

SEQ ID NO: 649 - RNA, 19 nt, Artificial Sequence
  synthetic
ccugaggaggucagugaaa

SEQ ID NO: 650 - RNA, 19 nt, Artificial Sequence
  synthetic
cugaggaggucagugaaac

SEQ ID NO: 651 - RNA, 19 nt, Artificial Sequence
  synthetic
ugaggaggucagugaaaca

SEQ ID NO: 652 - RNA, 19 nt, Artificial Sequence
  synthetic
gaggaggucagugaaacac

SEQ ID NO: 653 - RNA, 19 nt, Artificial Sequence
  synthetic
aggaggucagugaaacaca

SEQ ID NO: 654 - RNA, 19 nt, Artificial Sequence
  synthetic
ggaggucagugaaacacag

SEQ ID NO: 655 - RNA, 19 nt, Artificial Sequence
  synthetic
gaggucagugaaacacagg

SEQ ID NO: 656 - RNA, 19 nt, Artificial Sequence
  synthetic
aggucagugaaacacaggg

SEQ ID NO: 657 - RNA, 19 nt, Artificial Sequence
  synthetic
ggucagugaaacacaggga

SEQ ID NO: 658 - RNA, 19 nt, Artificial Sequence
  synthetic
gucagugaaacacagggaa

SEQ ID NO: 659 - RNA, 19 nt, Artificial Sequence
  synthetic
ucagugaaacacagggaac

SEQ ID NO: 660 - RNA, 19 nt, Artificial Sequence
  synthetic
acacagggaacagagagac

SEQ ID NO: 661 - RNA, 19 nt, Artificial Sequence
  synthetic
gagagacugacaauaacuu

SEQ ID NO: 662 - RNA, 19 nt, Artificial Sequence
  synthetic
agagacugacaauaacuua

SEQ ID NO: 663 - RNA, 19 nt, Artificial Sequence
  synthetic
cugacaauaacuuacucau

SEQ ID NO: 664 - RNA, 19 nt, Artificial Sequence
  synthetic
ucgucaaugaugugggaga

SEQ ID NO: 665 - RNA, 19 nt, Artificial Sequence
  synthetic
auuaacgguccugagucgg

SEQ ID NO: 666 - RNA, 19 nt, Artificial Sequence
  synthetic
gguccugagucgguuuugg

SEQ ID NO: 667 - RNA, 19 nt, Artificial Sequence
  synthetic
guccugagucgguuuuggu

SEQ ID NO: 668 - RNA, 19 nt, Artificial Sequence
  synthetic
uccugagucgguuuugguc

SEQ ID NO: 669 - RNA, 19 nt, Artificial Sequence
  synthetic
ccugagucgguuuugguca

SEQ ID NO: 670 - RNA, 19 nt, Artificial Sequence
  synthetic
cugagucgguuuuggucaa

SEQ ID NO: 671 - RNA, 19 nt, Artificial Sequence
  synthetic
ugagucgguuuuggucaau

SEQ ID NO: 672 - RNA, 19 nt, Artificial Sequence
  synthetic
gagucgguuuuggucaaua

SEQ ID NO: 673 - RNA, 19 nt, Artificial Sequence
  synthetic
agucgguuuuggucaauac

SEQ ID NO: 674 - RNA, 19 nt, Artificial Sequence
  synthetic
ucgguuuuggucaauaccu

SEQ ID NO: 675 - RNA, 19 nt, Artificial Sequence
  synthetic
cgguuuuggucaauaccua

SEQ ID NO: 676 - RNA, 19 nt, Artificial Sequence
  synthetic
guuuuggucaauaccuauc

SEQ ID NO: 677 - RNA, 19 nt, Artificial Sequence
  synthetic
uuggucaauaccuaucaau

SEQ ID NO: 678 - RNA, 19 nt, Artificial Sequence
  synthetic
uggucaauaccuaucaaug

SEQ ID NO: 679 - RNA, 19 nt, Artificial Sequence
  synthetic
ggucaauaccuaucaaugg

SEQ ID NO: 680 - RNA, 19 nt, Artificial Sequence
  synthetic
gucaauaccuaucaaugga

SEQ ID NO: 681 - RNA, 19 nt, Artificial Sequence
  synthetic
ucaauaccuaucaauggau

SEQ ID NO: 682 - RNA, 19 nt, Artificial Sequence
  synthetic
aauaccuaucaauggauca

SEQ ID NO: 683 - RNA, 19 nt, Artificial Sequence
  synthetic
auaccuaucaauggaucau

SEQ ID NO: 684 - RNA, 19 nt, Artificial Sequence
  synthetic
uaccuaucaauggaucauc

SEQ ID NO: 685 - RNA, 19 nt, Artificial Sequence
  synthetic
accuaucaauggaucauca

SEQ ID NO: 686 - RNA, 19 nt, Artificial Sequence
  synthetic
ccuaucaauggaucaucag

SEQ ID NO: 687 - RNA, 19 nt, Artificial Sequence
  synthetic
uaucaauggaucaucagaa

SEQ ID NO: 688 - RNA, 19 nt, Artificial Sequence
  synthetic
aucaauggaucaucagaaa

SEQ ID NO: 689 - RNA, 19 nt, Artificial Sequence
  synthetic
ucaauggaucaucagaaau

SEQ ID NO: 690 - RNA, 19 nt, Artificial Sequence
  synthetic
caauggaucaucagaaauu

SEQ ID NO: 691 - RNA, 19 nt, Artificial Sequence
  synthetic
aauggaucaucagaaauug

SEQ ID NO: 692 - RNA, 19 nt, Artificial Sequence
  synthetic
auggaucaucagaaauugg

SEQ ID NO: 693 - RNA, 19 nt, Artificial Sequence
  synthetic
uggaucaucagaaauuggg

SEQ ID NO: 694 - RNA, 19 nt, Artificial Sequence
  synthetic
ggaucaucagaaauuggga

SEQ ID NO: 695 - RNA, 19 nt, Artificial Sequence
  synthetic
gaucaucagaaauugggaa

SEQ ID NO: 696 - RNA, 19 nt, Artificial Sequence
  synthetic
aucaucagaaauugggaag

SEQ ID NO: 697 - RNA, 19 nt, Artificial Sequence
  synthetic
ucaucagaaauugggaagc

SEQ ID NO: 698 - RNA, 19 nt, Artificial Sequence
  synthetic
caucagaaauugggaagcu

SEQ ID NO: 699 - RNA, 19 nt, Artificial Sequence
  synthetic
aucagaaauugggaagcug

SEQ ID NO: 700 - RNA, 19 nt, Artificial Sequence
  synthetic
ucagaaauugggaagcugu

SEQ ID NO: 701 - RNA, 19 nt, Artificial Sequence
  synthetic
cagaaauugggaagcuguc

SEQ ID NO: 702 - RNA, 19 nt, Artificial Sequence
  synthetic
agaaauugggaagcuguca

SEQ ID NO: 703 - RNA, 19 nt, Artificial Sequence
  synthetic
gaaauugggaagcugucaa

SEQ ID NO: 704 - RNA, 19 nt, Artificial Sequence
  synthetic
aaauugggaagcugucaaa

SEQ ID NO: 705 - RNA, 19 nt, Artificial Sequence
  synthetic
aauugggaagcugucaaaa

SEQ ID NO: 706 - RNA, 19 nt, Artificial Sequence
  synthetic
auugggaagcugucaaaau

SEQ ID NO: 707 - RNA, 19 nt, Artificial Sequence
  synthetic
uugggaagcugucaaaauu

SEQ ID NO: 708 - RNA, 19 nt, Artificial Sequence
  synthetic
ugggaagcugucaaaauuc

SEQ ID NO: 709 - RNA, 19 nt, Artificial Sequence
  synthetic
gggaagcugucaaaauuca

SEQ ID NO: 710 - RNA, 19 nt, Artificial Sequence
  synthetic
ggaagcugucaaaauucaa

SEQ ID NO: 711 - RNA, 19 nt, Artificial Sequence
  synthetic
gaagcugucaaaauucaau

SEQ ID NO: 712 - RNA, 19 nt, Artificial Sequence
  synthetic
aagcugucaaaauucaaug

SEQ ID NO: 713 - RNA, 19 nt, Artificial Sequence
  synthetic
agcugucaaaauucaaugg

SEQ ID NO: 714 - RNA, 19 nt, Artificial Sequence
  synthetic
gcugucaaaauucaauggu

SEQ ID NO: 715 - RNA, 19 nt, Artificial Sequence
  synthetic
cugucaaaauucaaugguc

SEQ ID NO: 716 - RNA, 19 nt, Artificial Sequence
  synthetic
ugucaaaauucaauggucu

SEQ ID NO: 717 - RNA, 19 nt, Artificial Sequence
  synthetic
gucaaaauucaauggucuc

SEQ ID NO: 718 - RNA, 19 nt, Artificial Sequence
  synthetic
ucaaaauucaauggucuca

SEQ ID NO: 719 - RNA, 19 nt, Artificial Sequence
  synthetic
caaaauucaauggucucag

SEQ ID NO: 720 - RNA, 19 nt, Artificial Sequence
  synthetic
aaaauucaauggucucaga

SEQ ID NO: 721 - RNA, 19 nt, Artificial Sequence
  synthetic
aaauucaauggucucagaa

SEQ ID NO: 722 - RNA, 19 nt, Artificial Sequence
  synthetic
aauucaauggucucagaau

SEQ ID NO: 723 - RNA, 19 nt, Artificial Sequence
  synthetic
auucaauggucucagaauc

SEQ ID NO: 724 - RNA, 19 nt, Artificial Sequence
  synthetic
uucaauggucucagaaucc

SEQ ID NO: 725 - RNA, 19 nt, Artificial Sequence
  synthetic
ucaauggucucagaauccu

SEQ ID NO: 726 - RNA, 19 nt, Artificial Sequence
  synthetic
caauggucucagaauccug

SEQ ID NO: 727 - RNA, 19 nt, Artificial Sequence
  synthetic
gcaauguuguacaacaaaa

SEQ ID NO: 728 - RNA, 19 nt, Artificial Sequence
  synthetic
caauguuguacaacaaaau

SEQ ID NO: 729 - RNA, 19 nt, Artificial Sequence
  synthetic
aauguuguacaacaaaaug

SEQ ID NO: 730 - RNA, 19 nt, Artificial Sequence
  synthetic
auguuguacaacaaaaugg

SEQ ID NO: 731 - RNA, 19 nt, Artificial Sequence
  synthetic
uguuguacaacaaaaugga

SEQ ID NO: 732 - RNA, 19 nt, Artificial Sequence
  synthetic
guuguacaacaaaauggaa

SEQ ID NO: 733 - RNA, 19 nt, Artificial Sequence
  synthetic
uuguacaacaaaauggaau

SEQ ID NO: 734 - RNA, 19 nt, Artificial Sequence
  synthetic
uguacaacaaaauggaauu

SEQ ID NO: 735 - RNA, 19 nt, Artificial Sequence
  synthetic
guacaacaaaauggaauuu

SEQ ID NO: 736 - RNA, 19 nt, Artificial Sequence
  synthetic
uacaacaaaauggaauuug

SEQ ID NO: 737 - RNA, 19 nt, Artificial Sequence
  synthetic
acaacaaaauggaauuuga

SEQ ID NO: 738 - RNA, 19 nt, Artificial Sequence
  synthetic
caacaaaauggaauuugaa

SEQ ID NO: 739 - RNA, 19 nt, Artificial Sequence
  synthetic
aacaaaauggaauuugaac

SEQ ID NO: 740 - RNA, 19 nt, Artificial Sequence
  synthetic
acaaaauggaauuugaacc

SEQ ID NO: 741 - RNA, 19 nt, Artificial Sequence
  synthetic
caaaauggaauuugaacca

SEQ ID NO: 742 - RNA, 19 nt, Artificial Sequence
  synthetic
aaaauggaauuugaaccau

SEQ ID NO: 743 - RNA, 19 nt, Artificial Sequence
  synthetic
aaauggaauuugaaccauu

SEQ ID NO: 744 - RNA, 19 nt, Artificial Sequence
  synthetic
aauggaauuugaaccauuu

SEQ ID NO: 745 - RNA, 19 nt, Artificial Sequence
  synthetic
auggaauuugaaccauuuc

SEQ ID NO: 746 - RNA, 19 nt, Artificial Sequence
  synthetic
uggaauuugaaccauuuca

SEQ ID NO: 747 - RNA, 19 nt, Artificial Sequence
  synthetic
ggaauuugaaccauuucaa

SEQ ID NO: 748 - RNA, 19 nt, Artificial Sequence
  synthetic
gaauuugaaccauuucaau

SEQ ID NO: 749 - RNA, 19 nt, Artificial Sequence
  synthetic
aauuugaaccauuucaauc

SEQ ID NO: 750 - RNA, 19 nt, Artificial Sequence
  synthetic
auuugaaccauuucaaucu

SEQ ID NO: 751 - RNA, 19 nt, Artificial Sequence
  synthetic
uuugaaccauuucaaucuu

SEQ ID NO: 752 - RNA, 19 nt, Artificial Sequence
  synthetic
uugaaccauuucaaucuuu

SEQ ID NO: 753 - RNA, 19 nt, Artificial Sequence
  synthetic
ugaaccauuucaaucuuua

SEQ ID NO: 754 - RNA, 19 nt, Artificial Sequence
  synthetic
gaaccauuucaaucuuuag

SEQ ID NO: 755 - RNA, 19 nt, Artificial Sequence
  synthetic
aaccauuucaaucuuuagu

SEQ ID NO: 756 - RNA, 19 nt, Artificial Sequence
  synthetic
caaucuuuaguuccuaagg

SEQ ID NO: 757 - RNA, 19 nt, Artificial Sequence
  synthetic
gccauuagaggccaauaca

SEQ ID NO: 758 - RNA, 19 nt, Artificial Sequence
  synthetic
gccaauacaguggguuugu

SEQ ID NO: 759 - RNA, 19 nt, Artificial Sequence
  synthetic
ccaauacaguggguuuguc

SEQ ID NO: 760 - RNA, 19 nt, Artificial Sequence
  synthetic
caauacaguggguuuguca

SEQ ID NO: 761 - RNA, 19 nt, Artificial Sequence
  synthetic
aauacaguggguuugucag

SEQ ID NO: 762 - RNA, 19 nt, Artificial Sequence
  synthetic
auacaguggguuugucaga

SEQ ID NO: 763 - RNA, 19 nt, Artificial Sequence
  synthetic
uacaguggguuugucagaa

SEQ ID NO: 764 - RNA, 19 nt, Artificial Sequence
  synthetic
acaguggguuugucagaac

SEQ ID NO: 765 - RNA, 19 nt, Artificial Sequence
  synthetic
caguggguuugucagaacu

SEQ ID NO: 766 - RNA, 19 nt, Artificial Sequence
  synthetic
aguggguuugucagaacuc

SEQ ID NO: 767 - RNA, 19 nt, Artificial Sequence
  synthetic
cuauuccaacaaaugagag

SEQ ID NO: 768 - RNA, 19 nt, Artificial Sequence
  synthetic
gauguacuugggacauuug

SEQ ID NO: 769 - RNA, 19 nt, Artificial Sequence
  synthetic
gauaccacccagauaauaa

SEQ ID NO: 770 - RNA, 19 nt, Artificial Sequence
  synthetic
accacccagauaauaaagc

SEQ ID NO: 771 - RNA, 19 nt, Artificial Sequence
  synthetic
ccacccagauaauaaagcu

SEQ ID NO: 772 - RNA, 19 nt, Artificial Sequence
  synthetic
cacccagauaauaaagcuu

SEQ ID NO: 773 - RNA, 19 nt, Artificial Sequence
  synthetic
acccagauaauaaagcuuc

SEQ ID NO: 774 - RNA, 19 nt, Artificial Sequence
  synthetic
cccagauaauaaagcuucu

SEQ ID NO: 775 - RNA, 19 nt, Artificial Sequence
  synthetic
ccagauaauaaagcuucuc

SEQ ID NO: 776 - RNA, 19 nt, Artificial Sequence
  synthetic
cagauaauaaagcuucucc

SEQ ID NO: 777 - RNA, 19 nt, Artificial Sequence
  synthetic
agauaauaaagcuucuccc

SEQ ID NO: 778 - RNA, 19 nt, Artificial Sequence
  synthetic
gauaauaaagcuucucccu

SEQ ID NO: 779 - RNA, 19 nt, Artificial Sequence
  synthetic
auaauaaagcuucucccuu

SEQ ID NO: 780 - RNA, 19 nt, Artificial Sequence
  synthetic
uaauaaagcuucucccuuu

SEQ ID NO: 781 - RNA, 19 nt, Artificial Sequence
  synthetic
aauaaagcuucucccuuuu

SEQ ID NO: 782 - RNA, 19 nt, Artificial Sequence
  synthetic
auaaagcuucucccuuuug

SEQ ID NO: 783 - RNA, 19 nt, Artificial Sequence
  synthetic
uaaagcuucucccuuuugc

SEQ ID NO: 784 - RNA, 19 nt, Artificial Sequence
  synthetic
aaagcuucucccuuuugca

SEQ ID NO: 785 - RNA, 19 nt, Artificial Sequence
  synthetic
aagcuucucccuuuugcag

SEQ ID NO: 786 - RNA, 19 nt, Artificial Sequence
  synthetic
agcuucucccuuuugcagc

SEQ ID NO: 787 - RNA, 19 nt, Artificial Sequence
  synthetic
gcuucucccuuuugcagcc

SEQ ID NO: 788 - RNA, 19 nt, Artificial Sequence
  synthetic
cuucucccuuuugcagccg

SEQ ID NO: 789 - RNA, 19 nt, Artificial Sequence
  synthetic
uucucccuuuugcagccgc

SEQ ID NO: 790 - RNA, 19 nt, Artificial Sequence
  synthetic
ucucccuuuugcagccgcu

SEQ ID NO: 791 - RNA, 19 nt, Artificial Sequence
  synthetic
cucccuuuugcagccgcuc

SEQ ID NO: 792 - RNA, 19 nt, Artificial Sequence
  synthetic
ucccuuuugcagccgcucc

SEQ ID NO: 793 - RNA, 19 nt, Artificial Sequence
  synthetic
cccuuuugcagccgcucca

SEQ ID NO: 794 - RNA, 19 nt, Artificial Sequence
  synthetic
ccuuuugcagccgcuccac

SEQ ID NO: 795 - RNA, 19 nt, Artificial Sequence
  synthetic
cuuuugcagccgcuccacc

SEQ ID NO: 796 - RNA, 19 nt, Artificial Sequence
  synthetic
uuuugcagccgcuccacca

SEQ ID NO: 797 - RNA, 19 nt, Artificial Sequence
  synthetic
uuugcagccgcuccaccaa

SEQ ID NO: 798 - RNA, 19 nt, Artificial Sequence
  synthetic
uugcagccgcuccaccaaa

SEQ ID NO: 799 - RNA, 19 nt, Artificial Sequence
  synthetic
ugcagccgcuccaccaaag

SEQ ID NO: 800 - RNA, 19 nt, Artificial Sequence
  synthetic
gcagccgcuccaccaaagc

SEQ ID NO: 801 - RNA, 19 nt, Artificial Sequence
  synthetic
cagccgcuccaccaaagca

SEQ ID NO: 802 - RNA, 19 nt, Artificial Sequence
  synthetic
agccgcuccaccaaagcaa

SEQ ID NO: 803 - RNA, 19 nt, Artificial Sequence
  synthetic
gccgcuccaccaaagcaaa

SEQ ID NO: 804 - RNA, 19 nt, Artificial Sequence
  synthetic
ccgcuccaccaaagcaaag

SEQ ID NO: 805 - RNA, 19 nt, Artificial Sequence
  synthetic
cgcuccaccaaagcaaagc

SEQ ID NO: 806 - RNA, 19 nt, Artificial Sequence
  synthetic
gcuccaccaaagcaaagca

SEQ ID NO: 807 - RNA, 19 nt, Artificial Sequence
  synthetic
cuccaccaaagcaaagcag

SEQ ID NO: 808 - RNA, 19 nt, Artificial Sequence
  synthetic
caaagcagaaugcaguucu

SEQ ID NO: 809 - RNA, 19 nt, Artificial Sequence
  synthetic
aaagcagaaugcaguucuc

SEQ ID NO: 810 - RNA, 19 nt, Artificial Sequence
  synthetic
aagcagaaugcaguucucu

SEQ ID NO: 811 - RNA, 19 nt, Artificial Sequence
  synthetic
agcagaaugcaguucucuu

SEQ ID NO: 812 - RNA, 19 nt, Artificial Sequence
  synthetic
gcagaaugcaguucucuuc

SEQ ID NO: 813 - RNA, 19 nt, Artificial Sequence
  synthetic
cagaaugcaguucucuuca

SEQ ID NO: 814 - RNA, 19 nt, Artificial Sequence
  synthetic
ucauugacuguaaauguga

SEQ ID NO: 815 - RNA, 19 nt, Artificial Sequence
  synthetic
ugacuguaaaugugagggg

SEQ ID NO: 816 - RNA, 19 nt, Artificial Sequence
  synthetic
gacuguaaaugugagggga

SEQ ID NO: 817 - RNA, 19 nt, Artificial Sequence
  synthetic
acuguaaaugugaggggau

SEQ ID NO: 818 - RNA, 19 nt, Artificial Sequence
  synthetic
cuguaaaugugaggggauc

SEQ ID NO: 819 - RNA, 19 nt, Artificial Sequence
  synthetic
uguaaaugugaggggauca

SEQ ID NO: 820 - RNA, 19 nt, Artificial Sequence
  synthetic
guaaaugugaggggaucag

SEQ ID NO: 821 - RNA, 19 nt, Artificial Sequence
  synthetic
uaaaugugaggggaucagg

SEQ ID NO: 822 - RNA, 19 nt, Artificial Sequence
  synthetic
aaaugugaggggaucaggg

SEQ ID NO: 823 - RNA, 19 nt, Artificial Sequence
  synthetic
aaugugaggggaucaggga

SEQ ID NO: 824 - RNA, 19 nt, Artificial Sequence
  synthetic
augugaggggaucagggau

SEQ ID NO: 825 - RNA, 19 nt, Artificial Sequence
  synthetic
ugugaggggaucagggaug

SEQ ID NO: 826 - RNA, 19 nt, Artificial Sequence
  synthetic
gugaggggaucagggauga

SEQ ID NO: 827 - RNA, 19 nt, Artificial Sequence
  synthetic
ugaggggaucagggaugag

SEQ ID NO: 828 - RNA, 19 nt, Artificial Sequence
  synthetic
gaggggaucagggaugaga

SEQ ID NO: 829 - RNA, 19 nt, Artificial Sequence
  synthetic
aggggaucagggaugagaa

SEQ ID NO: 830 - RNA, 19 nt, Artificial Sequence
  synthetic
ggggaucagggaugagaau

SEQ ID NO: 831 - RNA, 19 nt, Artificial Sequence
  synthetic
gggaucagggaugagaaua

SEQ ID NO: 832 - RNA, 19 nt, Artificial Sequence
  synthetic
ggaucagggaugagaauac

SEQ ID NO: 833 - RNA, 19 nt, Artificial Sequence
  synthetic
gaucagggaugagaauacu

SEQ ID NO: 834 - RNA, 19 nt, Artificial Sequence
  synthetic
aucagggaugagaauacuu

SEQ ID NO: 835 - RNA, 19 nt, Artificial Sequence
  synthetic
ucagggaugagaauacuug

SEQ ID NO: 836 - RNA, 19 nt, Artificial Sequence
  synthetic
cagggaugagaauacuugu

SEQ ID NO: 837 - RNA, 19 nt, Artificial Sequence
  synthetic
agggaugagaauacuugua

SEQ ID NO: 838 - RNA, 19 nt, Artificial Sequence
  synthetic
gggaugagaauacuuguaa

SEQ ID NO: 839 - RNA, 19 nt, Artificial Sequence
  synthetic
ggaugagaauacuuguaag

SEQ ID NO: 840 - RNA, 19 nt, Artificial Sequence
  synthetic
gaugagaauacuuguaagg

SEQ ID NO: 841 - RNA, 19 nt, Artificial Sequence
  synthetic
augagaauacuuguaaggg

SEQ ID NO: 842 - RNA, 19 nt, Artificial Sequence
  synthetic
ugagaauacuuguaagggg

SEQ ID NO: 843 - RNA, 19 nt, Artificial Sequence
  synthetic
gagaauacuuguaaggggc

SEQ ID NO: 844 - RNA, 19 nt, Artificial Sequence
  synthetic
agaauacuuguaaggggca

SEQ ID NO: 845 - RNA, 19 nt, Artificial Sequence
  synthetic
gaauacuuguaaggggcaa

SEQ ID NO: 846 - RNA, 19 nt, Artificial Sequence
  synthetic
aauacuuguaaggggcaau

SEQ ID NO: 847 - RNA, 19 nt, Artificial Sequence
  synthetic
auacuuguaaggggcaauu

SEQ ID NO: 848 - RNA, 19 nt, Artificial Sequence
  synthetic
uacuuguaaggggcaauuc

SEQ ID NO: 849 - RNA, 19 nt, Artificial Sequence
  synthetic
acuuguaaggggcaauucu

SEQ ID NO: 850 - RNA, 19 nt, Artificial Sequence
  synthetic
cuuguaaggggcaauucuc

SEQ ID NO: 851 - RNA, 19 nt, Artificial Sequence
  synthetic
uuguaaggggcaauucucc

SEQ ID NO: 852 - RNA, 19 nt, Artificial Sequence
  synthetic
uguaaggggcaauucuccu

SEQ ID NO: 853 - RNA, 19 nt, Artificial Sequence
  synthetic
guaaggggcaauucuccug

SEQ ID NO: 854 - RNA, 19 nt, Artificial Sequence
  synthetic
uaaggggcaauucuccugu

SEQ ID NO: 855 - RNA, 19 nt, Artificial Sequence
  synthetic
aaggggcaauucuccugua

SEQ ID NO: 856 - RNA, 19 nt, Artificial Sequence
  synthetic
aggggcaauucuccuguau

SEQ ID NO: 857 - RNA, 19 nt, Artificial Sequence
  synthetic
ggggcaauucuccuguauu

SEQ ID NO: 858 - RNA, 19 nt, Artificial Sequence
  synthetic
gggcaauucuccuguauuc

SEQ ID NO: 859 - RNA, 19 nt, Artificial Sequence
  synthetic
ggcaauucuccuguauuca

SEQ ID NO: 860 - RNA, 19 nt, Artificial Sequence
  synthetic
gcaauucuccuguauucaa

SEQ ID NO: 861 - RNA, 19 nt, Artificial Sequence
  synthetic
caauucuccuguauucaac

SEQ ID NO: 862 - RNA, 19 nt, Artificial Sequence
  synthetic
aauucuccuguauucaacu

SEQ ID NO: 863 - RNA, 19 nt, Artificial Sequence
  synthetic
auucuccuguauucaacua

SEQ ID NO: 864 - RNA, 19 nt, Artificial Sequence
  synthetic
uucuccuguauucaacuac

SEQ ID NO: 865 - RNA, 19 nt, Artificial Sequence
  synthetic
ucuccuguauucaacuaca

SEQ ID NO: 866 - RNA, 19 nt, Artificial Sequence
  synthetic
cuccuguauucaacuacaa

SEQ ID NO: 867 - RNA, 19 nt, Artificial Sequence
  synthetic
uccuguauucaacuacaac

SEQ ID NO: 868 - RNA, 19 nt, Artificial Sequence
  synthetic
ccuguauucaacuacaaca

SEQ ID NO: 869 - RNA, 19 nt, Artificial Sequence
  synthetic
cuguauucaacuacaacaa

SEQ ID NO: 870 - RNA, 19 nt, Artificial Sequence
  synthetic
uguauucaacuacaacaag

SEQ ID NO: 871 - RNA, 19 nt, Artificial Sequence
  synthetic
guauucaacuacaacaaga

SEQ ID NO: 872 - RNA, 19 nt, Artificial Sequence
  synthetic
uauucaacuacaacaagac

SEQ ID NO: 873 - RNA, 19 nt, Artificial Sequence
  synthetic
auucaacuacaacaagacc

SEQ ID NO: 874 - RNA, 19 nt, Artificial Sequence
  synthetic
uucaacuacaacaagacca

SEQ ID NO: 875 - RNA, 19 nt, Artificial Sequence
  synthetic
ucaacuacaacaagaccac

SEQ ID NO: 876 - RNA, 19 nt, Artificial Sequence
  synthetic
caacuacaacaagaccacu

SEQ ID NO: 877 - RNA, 19 nt, Artificial Sequence
  synthetic
aacuacaacaagaccacua

SEQ ID NO: 878 - RNA, 19 nt, Artificial Sequence
  synthetic
acuacaacaagaccacuaa

SEQ ID NO: 879 - RNA, 19 nt, Artificial Sequence
  synthetic
cuacaacaagaccacuaaa

SEQ ID NO: 880 - RNA, 19 nt, Artificial Sequence
  synthetic
uacaacaagaccacuaaaa

SEQ ID NO: 881 - RNA, 19 nt, Artificial Sequence
  synthetic
acaacaagaccacuaaaag

SEQ ID NO: 882 - RNA, 19 nt, Artificial Sequence
  synthetic
caacaagaccacuaaaaga

SEQ ID NO: 883 - RNA, 19 nt, Artificial Sequence
  synthetic
aacaagaccacuaaaagac

SEQ ID NO: 884 - RNA, 19 nt, Artificial Sequence
  synthetic
acaagaccacuaaaagacu

SEQ ID NO: 885 - RNA, 19 nt, Artificial Sequence
  synthetic
caagaccacuaaaagacua

SEQ ID NO: 886 - RNA, 19 nt, Artificial Sequence
  synthetic
aagaccacuaaaagacuaa

SEQ ID NO: 887 - RNA, 19 nt, Artificial Sequence
  synthetic
agaccacuaaaagacuaac

SEQ ID NO: 888 - RNA, 19 nt, Artificial Sequence
  synthetic
gaccacuaaaagacuaaca

SEQ ID NO: 889 - RNA, 19 nt, Artificial Sequence
  synthetic
cuaacaauucucggaaaag

SEQ ID NO: 890 - RNA, 19 nt, Artificial Sequence
  synthetic
uucucggaaaagaugccgg

SEQ ID NO: 891 - RNA, 19 nt, Artificial Sequence
  synthetic
ucucggaaaagaugccggc

SEQ ID NO: 892 - RNA, 19 nt, Artificial Sequence
  synthetic
cucggaaaagaugccggca

SEQ ID NO: 893 - RNA, 19 nt, Artificial Sequence
  synthetic
ucggaaaagaugccggcac

SEQ ID NO: 894 - RNA, 19 nt, Artificial Sequence
  synthetic
cggaaaagaugccggcacu

SEQ ID NO: 895 - RNA, 19 nt, Artificial Sequence
  synthetic
ggaaaagaugccggcacuu

SEQ ID NO: 896 - RNA, 19 nt, Artificial Sequence
  synthetic
gaaaagaugccggcacuuu

SEQ ID NO: 897 - RNA, 19 nt, Artificial Sequence
  synthetic
aaaagaugccggcacuuua

SEQ ID NO: 898 - RNA, 19 nt, Artificial Sequence
  synthetic
aaagaugccggcacuuuaa

SEQ ID NO: 899 - RNA, 19 nt, Artificial Sequence
  synthetic
aagaugccggcacuuuaau

SEQ ID NO: 900 - RNA, 19 nt, Artificial Sequence
  synthetic
agaugccggcacuuuaauu

SEQ ID NO: 901 - RNA, 19 nt, Artificial Sequence
  synthetic
gaugccggcacuuuaauug

SEQ ID NO: 902 - RNA, 19 nt, Artificial Sequence
  synthetic
augccggcacuuuaauuga

SEQ ID NO: 903 - RNA, 19 nt, Artificial Sequence
  synthetic
ugccggcacuuuaauugaa

SEQ ID NO: 904 - RNA, 19 nt, Artificial Sequence
  synthetic
gccggcacuuuaauugaag

SEQ ID NO: 905 - RNA, 19 nt, Artificial Sequence
  synthetic
ccggcacuuuaauugaaga

SEQ ID NO: 906 - RNA, 19 nt, Artificial Sequence
  synthetic
cggcacuuuaauugaagac

SEQ ID NO: 907 - RNA, 19 nt, Artificial Sequence
  synthetic
ggcacuuuaauugaagacc

SEQ ID NO: 908 - RNA, 19 nt, Artificial Sequence
  synthetic
gcacuuuaauugaagaccc

SEQ ID NO: 909 - RNA, 19 nt, Artificial Sequence
  synthetic
cacuuuaauugaagaccca

SEQ ID NO: 910 - RNA, 19 nt, Artificial Sequence
  synthetic
acuuuaauugaagacccag

SEQ ID NO: 911 - RNA, 19 nt, Artificial Sequence
  synthetic
cuuuaauugaagacccaga

SEQ ID NO: 912 - RNA, 19 nt, Artificial Sequence
  synthetic
uuuaauugaagacccagau

SEQ ID NO: 913 - RNA, 19 nt, Artificial Sequence
  synthetic
uuaauugaagacccagaug

SEQ ID NO: 914 - RNA, 19 nt, Artificial Sequence
  synthetic
uaauugaagacccagauga

SEQ ID NO: 915 - RNA, 19 nt, Artificial Sequence
  synthetic
auugaagacccagaugaaa

SEQ ID NO: 916 - RNA, 19 nt, Artificial Sequence
  synthetic
gaagacccagaugaaagca

SEQ ID NO: 917 - RNA, 19 nt, Artificial Sequence
  synthetic
gcacauccggaguggaguc

SEQ ID NO: 918 - RNA, 19 nt, Artificial Sequence
  synthetic
acauccggaguggaguccg

SEQ ID NO: 919 - RNA, 19 nt, Artificial Sequence
  synthetic
gcugucuugagaggauuuc

SEQ ID NO: 920 - RNA, 19 nt, Artificial Sequence
  synthetic
cucauuauagguaaggaag

SEQ ID NO: 921 - RNA, 19 nt, Artificial Sequence
  synthetic
aaggaagacagaagauacg

SEQ ID NO: 922 - RNA, 19 nt, Artificial Sequence
  synthetic
aggaagacagaagauacgg

SEQ ID NO: 923 - RNA, 19 nt, Artificial Sequence
  synthetic
ggaagacagaagauacgga

SEQ ID NO: 924 - RNA, 19 nt, Artificial Sequence
  synthetic
gaagacagaagauacggac

SEQ ID NO: 925 - RNA, 19 nt, Artificial Sequence
  synthetic
aagacagaagauacggacc

SEQ ID NO: 926 - RNA, 19 nt, Artificial Sequence
  synthetic
agacagaagauacggacca

SEQ ID NO: 927 - RNA, 19 nt, Artificial Sequence
  synthetic
gacagaagauacggaccag

SEQ ID NO: 928 - RNA, 19 nt, Artificial Sequence
  synthetic
acagaagauacggaccagc

SEQ ID NO: 929 - RNA, 19 nt, Artificial Sequence
  synthetic
cagaagauacggaccagca

SEQ ID NO: 930 - RNA, 19 nt, Artificial Sequence
  synthetic
agaagauacggaccagcau

SEQ ID NO: 931 - RNA, 19 nt, Artificial Sequence
  synthetic
gaagauacggaccagcauu

SEQ ID NO: 932 - RNA, 19 nt, Artificial Sequence
  synthetic
aagauacggaccagcauua

SEQ ID NO: 933 - RNA, 19 nt, Artificial Sequence
  synthetic
agauacggaccagcauuaa

SEQ ID NO: 934 - RNA, 19 nt, Artificial Sequence
  synthetic
gauacggaccagcauuaag

SEQ ID NO: 935 - RNA, 19 nt, Artificial Sequence
  synthetic
gcauuaagcaucaaugaac

SEQ ID NO: 936 - RNA, 19 nt, Artificial Sequence
  synthetic
cugaguaaccuugcaaaag

SEQ ID NO: 937 - RNA, 19 nt, Artificial Sequence
  synthetic
aaccuugcaaaaggggaaa

SEQ ID NO: 938 - RNA, 19 nt, Artificial Sequence
  synthetic
accuugcaaaaggggaaaa

SEQ ID NO: 939 - RNA, 19 nt, Artificial Sequence
  synthetic
ggggaaaaagcuaaugugc

SEQ ID NO: 940 - RNA, 19 nt, Artificial Sequence
  synthetic
cuaauugggcaaggagacg

SEQ ID NO: 941 - RNA, 19 nt, Artificial Sequence
  synthetic
gugguguugguaaugaaac

SEQ ID NO: 942 - RNA, 19 nt, Artificial Sequence
  synthetic
guaaugaaacgaaaacggg

SEQ ID NO: 943 - RNA, 19 nt, Artificial Sequence
  synthetic
uaaugaaacgaaaacggga

SEQ ID NO: 944 - RNA, 19 nt, Artificial Sequence
  synthetic
aaugaaacgaaaacgggac

SEQ ID NO: 945 - RNA, 19 nt, Artificial Sequence
  synthetic
augaaacgaaaacgggacu

SEQ ID NO: 946 - RNA, 19 nt, Artificial Sequence
  synthetic
ugaaacgaaaacgggacuc

SEQ ID NO: 947 - RNA, 19 nt, Artificial Sequence
  synthetic
gaaacgaaaacgggacucu

SEQ ID NO: 948 - RNA, 19 nt, Artificial Sequence
  synthetic
aaacgaaaacgggacucua

SEQ ID NO: 949 - RNA, 19 nt, Artificial Sequence
  synthetic
aacgaaaacgggacucuag

SEQ ID NO: 950 - RNA, 19 nt, Artificial Sequence
  synthetic
acgaaaacgggacucuagc

SEQ ID NO: 951 - RNA, 19 nt, Artificial Sequence
  synthetic
cgaaaacgggacucuagca

SEQ ID NO: 952 - RNA, 19 nt, Artificial Sequence
  synthetic
gaaaacgggacucuagcau

SEQ ID NO: 953 - RNA, 19 nt, Artificial Sequence
  synthetic
aaaacgggacucuagcaua

SEQ ID NO: 954 - RNA, 19 nt, Artificial Sequence
  synthetic
aaacgggacucuagcauac

SEQ ID NO: 955 - RNA, 19 nt, Artificial Sequence
  synthetic
aacgggacucuagcauacu

SEQ ID NO: 956 - RNA, 19 nt, Artificial Sequence
  synthetic
acgggacucuagcauacuu

SEQ ID NO: 957 - RNA, 19 nt, Artificial Sequence
  synthetic
cgggacucuagcauacuua

SEQ ID NO: 958 - RNA, 19 nt, Artificial Sequence
  synthetic
gggacucuagcauacuuac

SEQ ID NO: 959 - RNA, 19 nt, Artificial Sequence
  synthetic
ggacucuagcauacuuacu

SEQ ID NO: 960 - RNA, 19 nt, Artificial Sequence
  synthetic
gacucuagcauacuuacug

SEQ ID NO: 961 - RNA, 19 nt, Artificial Sequence
  synthetic
acucuagcauacuuacuga

SEQ ID NO: 962 - RNA, 19 nt, Artificial Sequence
  synthetic
cucuagcauacuuacugac

SEQ ID NO: 963 - RNA, 19 nt, Artificial Sequence
  synthetic
ucuagcauacuuacugaca

SEQ ID NO: 964 - RNA, 19 nt, Artificial Sequence
  synthetic
cuagcauacuuacugacag

SEQ ID NO: 965 - RNA, 19 nt, Artificial Sequence
  synthetic
uagcauacuuacugacagc

SEQ ID NO: 966 - RNA, 19 nt, Artificial Sequence
  synthetic
agcauacuuacugacagcc

SEQ ID NO: 967 - RNA, 19 nt, Artificial Sequence
  synthetic
gcauacuuacugacagcca

SEQ ID NO: 968 - RNA, 19 nt, Artificial Sequence
  synthetic
cauacuuacugacagccag

SEQ ID NO: 969 - RNA, 19 nt, Artificial Sequence
  synthetic
auacuuacugacagccaga

SEQ ID NO: 970 - RNA, 19 nt, Artificial Sequence
  synthetic
uacuuacugacagccagac

SEQ ID NO: 971 - RNA, 19 nt, Artificial Sequence
  synthetic
acuuacugacagccagaca

SEQ ID NO: 972 - RNA, 19 nt, Artificial Sequence
  synthetic
cuuacugacagccagacag

SEQ ID NO: 973 - RNA, 19 nt, Artificial Sequence
  synthetic
uuacugacagccagacagc

SEQ ID NO: 974 - RNA, 19 nt, Artificial Sequence
  synthetic
uacugacagccagacagcg

SEQ ID NO: 975 - RNA, 19 nt, Artificial Sequence
  synthetic
acugacagccagacagcga

SEQ ID NO: 976 - RNA, 19 nt, Artificial Sequence
  synthetic
cugacagccagacagcgac

SEQ ID NO: 977 - RNA, 19 nt, Artificial Sequence
  synthetic
ugacagccagacagcgacc

SEQ ID NO: 978 - RNA, 19 nt, Artificial Sequence
  synthetic
gacagccagacagcgacca

SEQ ID NO: 979 - RNA, 19 nt, Artificial Sequence
  synthetic
acagccagacagcgaccaa

SEQ ID NO: 980 - RNA, 19 nt, Artificial Sequence
  synthetic
cagccagacagcgaccaaa

SEQ ID NO: 981 - RNA, 19 nt, Artificial Sequence
  synthetic
agccagacagcgaccaaaa

SEQ ID NO: 982 - RNA, 19 nt, Artificial Sequence
  synthetic
gccagacagcgaccaaaag

SEQ ID NO: 983 - RNA, 19 nt, Artificial Sequence
  synthetic
ccagacagcgaccaaaaga

SEQ ID NO: 984 - RNA, 19 nt, Artificial Sequence
  synthetic
cagacagcgaccaaaagaa

SEQ ID NO: 985 - RNA, 19 nt, Artificial Sequence
  synthetic
agacagcgaccaaaagaau

SEQ ID NO: 986 - RNA, 19 nt, Artificial Sequence
  synthetic
gacagcgaccaaaagaauu

SEQ ID NO: 987 - RNA, 19 nt, Artificial Sequence
  synthetic
acagcgaccaaaagaauuc

SEQ ID NO: 988 - RNA, 19 nt, Artificial Sequence
  synthetic
cagcgaccaaaagaauucg

SEQ ID NO: 989 - RNA, 19 nt, Artificial Sequence
  synthetic
agcgaccaaaagaauucgg

SEQ ID NO: 990 - RNA, 19 nt, Artificial Sequence
  synthetic
gcgaccaaaagaauucgga

SEQ ID NO: 991 - RNA, 19 nt, Artificial Sequence
  synthetic
cgaccaaaagaauucggau

SEQ ID NO: 992 - RNA, 19 nt, Artificial Sequence
  synthetic
gaccaaaagaauucggaug

SEQ ID NO: 993 - RNA, 19 nt, Artificial Sequence
  synthetic
accaaaagaauucggaugg

SEQ ID NO: 994 - RNA, 19 nt, Artificial Sequence
  synthetic
ccaaaagaauucggauggc

SEQ ID NO: 995 - RNA, 19 nt, Artificial Sequence
  synthetic
caaaagaauucggauggcc

SEQ ID NO: 996 - RNA, 19 nt, Artificial Sequence
  synthetic
aaaagaauucggauggcca

SEQ ID NO: 997 - RNA, 19 nt, Artificial Sequence
  synthetic
aaagaauucggauggccau

SEQ ID NO: 998 - RNA, 19 nt, Artificial Sequence
  synthetic
aagaauucggauggccauc

SEQ ID NO: 999 - RNA, 19 nt, Artificial Sequence
  synthetic
agaauucggauggccauca

SEQ ID NO: 1000 - RNA, 19 nt, Artificial Sequence
  synthetic
gaauucggauggccaucaa

SEQ ID NO: 1001 - RNA, 19 nt, Artificial Sequence
  synthetic
aauucggauggccaucaau

SEQ ID NO: 1002 - RNA, 19 nt, Artificial Sequence
  synthetic
auucggauggccaucaauu

SEQ ID NO: 1003 - RNA, 19 nt, Artificial Sequence
  synthetic
uucggauggccaucaauua

SEQ ID NO: 1004 - RNA, 19 nt, Artificial Sequence
  synthetic
ucggauggccaucaauuaa

SEQ ID NO: 1005 - RNA, 19 nt, Artificial Sequence
  synthetic
cggauggccaucaauuaau

SEQ ID NO: 1006 - RNA, 19 nt, Artificial Sequence
  synthetic
uguugaauaguuuaaaaac

SEQ ID NO: 1007 - RNA, 19 nt, Artificial Sequence
  synthetic
guuccauguuuuaaccuuu

SEQ ID NO: 1008 - RNA, 19 nt, Artificial Sequence
  synthetic
gccaaagguuccauguuuu

SEQ ID NO: 1009 - RNA, 19 nt, Artificial Sequence
  synthetic
ggugauaccaucacucgau

SEQ ID NO: 1010 - RNA, 19 nt, Artificial Sequence
  synthetic
cugggagaaaucuuguuuu

SEQ ID NO: 1011 - RNA, 19 nt, Artificial Sequence
  synthetic
cguaguucuuuuauucuuu

SEQ ID NO: 1012 - RNA, 19 nt, Artificial Sequence
  synthetic
caagggagaaauuuugcaa

SEQ ID NO: 1013 - RNA, 19 nt, Artificial Sequence
  synthetic
gauccagcaucacucauuu

SEQ ID NO: 1014 - RNA, 19 nt, Artificial Sequence
  synthetic
uugccaucauccauuucau

SEQ ID NO: 1015 - RNA, 19 nt, Artificial Sequence
  synthetic
auauaauugaccugcuuuu

SEQ ID NO: 1016 - RNA, 19 nt, Artificial Sequence
  synthetic
uuauucuuuccauacugaa

SEQ ID NO: 1017 - RNA, 19 nt, Artificial Sequence
  synthetic
guucuuuuauucuuuccau

SEQ ID NO: 1018 - RNA, 19 nt, Artificial Sequence
  synthetic
aguucuuuuauucuuucca

SEQ ID NO: 1019 - RNA, 19 nt, Artificial Sequence
  synthetic
uaguucuuuuauucuuucc

SEQ ID NO: 1020 - RNA, 19 nt, Artificial Sequence
  synthetic
guaguucuuuuauucuuuc

SEQ ID NO: 1021 - RNA, 19 nt, Artificial Sequence
  synthetic
cguaguucuuuuauucuuu

SEQ ID NO: 1022 - RNA, 19 nt, Artificial Sequence
  synthetic
ccguaguucuuuuauucuu

SEQ ID NO: 1023 - RNA, 19 nt, Artificial Sequence
  synthetic
uccguaguucuuuuauucu

SEQ ID NO: 1024 - RNA, 19 nt, Artificial Sequence
  synthetic
ucagguuccguaguucuuu

SEQ ID NO: 1025 - RNA, 19 nt, Artificial Sequence
  synthetic
gagugcgagacugcgacau

SEQ ID NO: 1026 - RNA, 19 nt, Artificial Sequence
  synthetic
cgagugcgagacugcgaca

SEQ ID NO: 1027 - RNA, 19 nt, Artificial Sequence
  synthetic
gcgagugcgagacugcgac

SEQ ID NO: 1028 - RNA, 19 nt, Artificial Sequence
  synthetic
cgcgagugcgagacugcga

SEQ ID NO: 1029 - RNA, 19 nt, Artificial Sequence
  synthetic
ucgcgagugcgagacugcg

SEQ ID NO: 1030 - RNA, 19 nt, Artificial Sequence
  synthetic
cucgcgagugcgagacugc

SEQ ID NO: 1031 - RNA, 19 nt, Artificial Sequence
  synthetic
ucucgcgagugcgagacug

SEQ ID NO: 1032 - RNA, 19 nt, Artificial Sequence
  synthetic
aucucgcgagugcgagacu

SEQ ID NO: 1033 - RNA, 19 nt, Artificial Sequence
  synthetic
uaucucgcgagugcgagac

SEQ ID NO: 1034 - RNA, 19 nt, Artificial Sequence
  synthetic
guaucucgcgagugcgaga

SEQ ID NO: 1035 - RNA, 19 nt, Artificial Sequence
  synthetic
aguaucucgcgagugcgag

SEQ ID NO: 1036 - RNA, 19 nt, Artificial Sequence
  synthetic
uuuuuguuaguaucucgcg

SEQ ID NO: 1037 - RNA, 19 nt, Artificial Sequence
  synthetic
gguccacugugguuuuugu

SEQ ID NO: 1038 - RNA, 19 nt, Artificial Sequence
  synthetic
ugguccacugugguuuuug

SEQ ID NO: 1039 - RNA, 19 nt, Artificial Sequence
  synthetic
augguccacugugguuuuu

SEQ ID NO: 1040 - RNA, 19 nt, Artificial Sequence
  synthetic
uaugguccacugugguuuu

SEQ ID NO: 1041 - RNA, 19 nt, Artificial Sequence
  synthetic
auaugguccacugugguuu

SEQ ID NO: 1042 - RNA, 19 nt, Artificial Sequence
  synthetic
cauaugguccacugugguu

SEQ ID NO: 1043 - RNA, 19 nt, Artificial Sequence
  synthetic
ccauaugguccacuguggu

SEQ ID NO: 1044 - RNA, 19 nt, Artificial Sequence
  synthetic
gccauaugguccacugugg

SEQ ID NO: 1045 - RNA, 19 nt, Artificial Sequence
  synthetic
ggccauaugguccacugug

SEQ ID NO: 1046 - RNA, 19 nt, Artificial Sequence
  synthetic
uggccauaugguccacugu

SEQ ID NO: 1047 - RNA, 19 nt, Artificial Sequence
  synthetic
auggccauaugguccacug

SEQ ID NO: 1048 - RNA, 19 nt, Artificial Sequence
  synthetic
uauggccauaugguccacu

SEQ ID NO: 1049 - RNA, 19 nt, Artificial Sequence
  synthetic
uuauggccauaugguccac

SEQ ID NO: 1050 - RNA, 19 nt, Artificial Sequence
  synthetic
auuauggccauauggucca

SEQ ID NO: 1051 - RNA, 19 nt, Artificial Sequence
  synthetic
aauuauggccauauggucc

SEQ ID NO: 1052 - RNA, 19 nt, Artificial Sequence
  synthetic
uaauuauggccauaugguc

SEQ ID NO: 1053 - RNA, 19 nt, Artificial Sequence
  synthetic
uuaauuauggccauauggu

SEQ ID NO: 1054 - RNA, 19 nt, Artificial Sequence
  synthetic
cuuaauuauggccauaugg

SEQ ID NO: 1055 - RNA, 19 nt, Artificial Sequence
  synthetic
ucuuaauuauggccauaug

SEQ ID NO: 1056 - RNA, 19 nt, Artificial Sequence
  synthetic
uucuuaauuauggccauau

SEQ ID NO: 1057 - RNA, 19 nt, Artificial Sequence
  synthetic
cuucuuaauuauggccaua

SEQ ID NO: 1058 - RNA, 19 nt, Artificial Sequence
  synthetic
acuucuuaauuauggccau

SEQ ID NO: 1059 - RNA, 19 nt, Artificial Sequence
  synthetic
uacuucuuaauuauggcca

SEQ ID NO: 1060 - RNA, 19 nt, Artificial Sequence
  synthetic
guacuucuuaauuauggcc

SEQ ID NO: 1061 - RNA, 19 nt, Artificial Sequence
  synthetic
uguacuucuuaauuauggc

SEQ ID NO: 1062 - RNA, 19 nt, Artificial Sequence
  synthetic
guguacuucuuaauuaugg

SEQ ID NO: 1063 - RNA, 19 nt, Artificial Sequence
  synthetic
uguguacuucuuaauuaug

SEQ ID NO: 1064 - RNA, 19 nt, Artificial Sequence
  synthetic
auguguacuucuuaauuau

SEQ ID NO: 1065 - RNA, 19 nt, Artificial Sequence
  synthetic
gauguguacuucuuaauua

SEQ ID NO: 1066 - RNA, 19 nt, Artificial Sequence
  synthetic
uuuccugucucccugaugu

SEQ ID NO: 1067 - RNA, 19 nt, Artificial Sequence
  synthetic
gguucuuuuccugucuccc

SEQ ID NO: 1068 - RNA, 19 nt, Artificial Sequence
  synthetic
ggguucuuuuccugucucc

SEQ ID NO: 1069 - RNA, 19 nt, Artificial Sequence
  synthetic
cggguucuuuuccugucuc

SEQ ID NO: 1070 - RNA, 19 nt, Artificial Sequence
  synthetic
acggguucuuuuccugucu

SEQ ID NO: 1071 - RNA, 19 nt, Artificial Sequence
  synthetic
gacggguucuuuuccuguc

SEQ ID NO: 1072 - RNA, 19 nt, Artificial Sequence
  synthetic
ugacggguucuuuuccugu

SEQ ID NO: 1073 - RNA, 19 nt, Artificial Sequence
  synthetic
gugacggguucuuuuccug

SEQ ID NO: 1074 - RNA, 19 nt, Artificial Sequence
  synthetic
agugacggguucuuuuccu

SEQ ID NO: 1075 - RNA, 19 nt, Artificial Sequence
  synthetic
aagugacggguucuuuucc

SEQ ID NO: 1076 - RNA, 19 nt, Artificial Sequence
  synthetic
uaagugacggguucuuuuc

SEQ ID NO: 1077 - RNA, 19 nt, Artificial Sequence
  synthetic
cuaagugacggguucuuuu

SEQ ID NO: 1078 - RNA, 19 nt, Artificial Sequence
  synthetic
ccuaagugacggguucuuu

SEQ ID NO: 1079 - RNA, 19 nt, Artificial Sequence
  synthetic
uccuaagugacggguucuu

SEQ ID NO: 1080 - RNA, 19 nt, Artificial Sequence
  synthetic
auccuaagugacggguucu

SEQ ID NO: 1081 - RNA, 19 nt, Artificial Sequence
  synthetic
cauccuaagugacggguuc

SEQ ID NO: 1082 - RNA, 19 nt, Artificial Sequence
  synthetic
ucauccuaagugacggguu

SEQ ID NO: 1083 - RNA, 19 nt, Artificial Sequence
  synthetic
uucauccuaagugacgggu

SEQ ID NO: 1084 - RNA, 19 nt, Artificial Sequence
  synthetic
uuucauccuaagugacggg

SEQ ID NO: 1085 - RNA, 19 nt, Artificial Sequence
  synthetic
auuucauccuaagugacgg

SEQ ID NO: 1086 - RNA, 19 nt, Artificial Sequence
  synthetic
cauuucauccuaagugacg

SEQ ID NO: 1087 - RNA, 19 nt, Artificial Sequence
  synthetic
ccauuucauccuaagugac

SEQ ID NO: 1088 - RNA, 19 nt, Artificial Sequence
  synthetic
uccauuucauccuaaguga

SEQ ID NO: 1089 - RNA, 19 nt, Artificial Sequence
  synthetic
auccauuucauccuaagug

SEQ ID NO: 1090 - RNA, 19 nt, Artificial Sequence
  synthetic
cauccauuucauccuaagu

SEQ ID NO: 1091 - RNA, 19 nt, Artificial Sequence
  synthetic
ucauccauuucauccuaag

SEQ ID NO: 1092 - RNA, 19 nt, Artificial Sequence
  synthetic
aucauccauuucauccuaa

SEQ ID NO: 1093 - RNA, 19 nt, Artificial Sequence
  synthetic
caucauccauuucauccua

SEQ ID NO: 1094 - RNA, 19 nt, Artificial Sequence
  synthetic
ccaucauccauuucauccu

SEQ ID NO: 1095 - RNA, 19 nt, Artificial Sequence
  synthetic
gccaucauccauuucaucc

SEQ ID NO: 1096 - RNA, 19 nt, Artificial Sequence
  synthetic
ugccaucauccauuucauc

SEQ ID NO: 1097 - RNA, 19 nt, Artificial Sequence
  synthetic
uugccaucauccauuucau

SEQ ID NO: 1098 - RNA, 19 nt, Artificial Sequence
  synthetic
auugccaucauccauuuca

SEQ ID NO: 1099 - RNA, 19 nt, Artificial Sequence
  synthetic
cauugccaucauccauuuc

SEQ ID NO: 1100 - RNA, 19 nt, Artificial Sequence
  synthetic
ucauugccaucauccauuu

SEQ ID NO: 1101 - RNA, 19 nt, Artificial Sequence
  synthetic
uucauugccaucauccauu

SEQ ID NO: 1102 - RNA, 19 nt, Artificial Sequence
  synthetic
uuucauugccaucauccau

SEQ ID NO: 1103 - RNA, 19 nt, Artificial Sequence
  synthetic
auuucauugccaucaucca

SEQ ID NO: 1104 - RNA, 19 nt, Artificial Sequence
  synthetic
uauuucauugccaucaucc

SEQ ID NO: 1105 - RNA, 19 nt, Artificial Sequence
  synthetic
cagugauuggauauuucau

SEQ ID NO: 1106 - RNA, 19 nt, Artificial Sequence
  synthetic
cuguuauccuuuugucagc

SEQ ID NO: 1107 - RNA, 19 nt, Artificial Sequence
  synthetic
uucucuccggaaccauuuc

SEQ ID NO: 1108 - RNA, 19 nt, Artificial Sequence
  synthetic
gaguuuguccuuguucauu

SEQ ID NO: 1109 - RNA, 19 nt, Artificial Sequence
  synthetic
auagaguuuguccuuguuc

SEQ ID NO: 1110 - RNA, 19 nt, Artificial Sequence
  synthetic
cauagaguuuguccuuguu

SEQ ID NO: 1111 - RNA, 19 nt, Artificial Sequence
  synthetic
ccauagaguuuguccuugu

SEQ ID NO: 1112 - RNA, 19 nt, Artificial Sequence
  synthetic
uccauagaguuuguccuug

SEQ ID NO: 1113 - RNA, 19 nt, Artificial Sequence
  synthetic
cuccauagaguuuguccuu

SEQ ID NO: 1114 - RNA, 19 nt, Artificial Sequence
  synthetic
acuccauagaguuuguccu

SEQ ID NO: 1115 - RNA, 19 nt, Artificial Sequence
  synthetic
uacuccauagaguuugucc

SEQ ID NO: 1116 - RNA, 19 nt, Artificial Sequence
  synthetic
uuacuccauagaguuuguc

SEQ ID NO: 1117 - RNA, 19 nt, Artificial Sequence
  synthetic
uuuacuccauagaguuugu

SEQ ID NO: 1118 - RNA, 19 nt, Artificial Sequence
  synthetic
uuuuacuccauagaguuug

SEQ ID NO: 1119 - RNA, 19 nt, Artificial Sequence
  synthetic
auuuuacuccauagaguuu

SEQ ID NO: 1120 - RNA, 19 nt, Artificial Sequence
  synthetic
cauuuuacuccauagaguu

SEQ ID NO: 1121 - RNA, 19 nt, Artificial Sequence
  synthetic
ucauuuuacuccauagagu

SEQ ID NO: 1122 - RNA, 19 nt, Artificial Sequence
  synthetic
cucauuuuacuccauagag

SEQ ID NO: 1123 - RNA, 19 nt, Artificial Sequence
  synthetic
acucauuuuacuccauaga

SEQ ID NO: 1124 - RNA, 19 nt, Artificial Sequence
  synthetic
cacucauuuuacuccauag

SEQ ID NO: 1125 - RNA, 19 nt, Artificial Sequence
  synthetic
ucacucauuuuacuccaua

SEQ ID NO: 1126 - RNA, 19 nt, Artificial Sequence
  synthetic
aucacucauuuuacuccau

SEQ ID NO: 1127 - RNA, 19 nt, Artificial Sequence
  synthetic
caucacucauuuuacucca

SEQ ID NO: 1128 - RNA, 19 nt, Artificial Sequence
  synthetic
gcaucacucauuuuacucc

SEQ ID NO: 1129 - RNA, 19 nt, Artificial Sequence
  synthetic
agcaucacucauuuuacuc

SEQ ID NO: 1130 - RNA, 19 nt, Artificial Sequence
  synthetic
cagcaucacucauuuuacu

SEQ ID NO: 1131 - RNA, 19 nt, Artificial Sequence
  synthetic
ccagcaucacucauuuuac

SEQ ID NO: 1132 - RNA, 19 nt, Artificial Sequence
  synthetic
uccagcaucacucauuuua

SEQ ID NO: 1133 - RNA, 19 nt, Artificial Sequence
  synthetic
auccagcaucacucauuuu

SEQ ID NO: 1134 - RNA, 19 nt, Artificial Sequence
  synthetic
gauccagcaucacucauuu

SEQ ID NO: 1135 - RNA, 19 nt, Artificial Sequence
  synthetic
ugauccagcaucacucauu

SEQ ID NO: 1136 - RNA, 19 nt, Artificial Sequence
  synthetic
cugauccagcaucacucau

SEQ ID NO: 1137 - RNA, 19 nt, Artificial Sequence
  synthetic
ucugauccagcaucacuca

SEQ ID NO: 1138 - RNA, 19 nt, Artificial Sequence
  synthetic
aucugauccagcaucacuc

SEQ ID NO: 1139 - RNA, 19 nt, Artificial Sequence
  synthetic
gaucugauccagcaucacu

SEQ ID NO: 1140 - RNA, 19 nt, Artificial Sequence
  synthetic
cgaucugauccagcaucac

SEQ ID NO: 1141 - RNA, 19 nt, Artificial Sequence
  synthetic
ucgaucugauccagcauca

SEQ ID NO: 1142 - RNA, 19 nt, Artificial Sequence
  synthetic
cucgaucugauccagcauc

SEQ ID NO: 1143 - RNA, 19 nt, Artificial Sequence
  synthetic
acucgaucugauccagcau

SEQ ID NO: 1144 - RNA, 19 nt, Artificial Sequence
  synthetic
cacucgaucugauccagca

SEQ ID NO: 1145 - RNA, 19 nt, Artificial Sequence
  synthetic
ucacucgaucugauccagc

SEQ ID NO: 1146 - RNA, 19 nt, Artificial Sequence
  synthetic
aucacucgaucugauccag

SEQ ID NO: 1147 - RNA, 19 nt, Artificial Sequence
  synthetic
caucacucgaucugaucca

SEQ ID NO: 1148 - RNA, 19 nt, Artificial Sequence
  synthetic
auaccaucacucgaucuga

SEQ ID NO: 1149 - RNA, 19 nt, Artificial Sequence
  synthetic
gauaccaucacucgaucug

SEQ ID NO: 1150 - RNA, 19 nt, Artificial Sequence
  synthetic
ugauaccaucacucgaucu

SEQ ID NO: 1151 - RNA, 19 nt, Artificial Sequence
  synthetic
gugauaccaucacucgauc

SEQ ID NO: 1152 - RNA, 19 nt, Artificial Sequence
  synthetic
ggugauaccaucacucgau

SEQ ID NO: 1153 - RNA, 19 nt, Artificial Sequence
  synthetic
aggugauaccaucacucga

SEQ ID NO: 1154 - RNA, 19 nt, Artificial Sequence
  synthetic
aaggugauaccaucacucg

SEQ ID NO: 1155 - RNA, 19 nt, Artificial Sequence
  synthetic
aaaggugauaccaucacuc

SEQ ID NO: 1156 - RNA, 19 nt, Artificial Sequence
  synthetic
caaaggugauaccaucacu

SEQ ID NO: 1157 - RNA, 19 nt, Artificial Sequence
  synthetic
ccaaaggugauaccaucac

SEQ ID NO: 1158 - RNA, 19 nt, Artificial Sequence
  synthetic
gccaaaggugauaccauca

SEQ ID NO: 1159 - RNA, 19 nt, Artificial Sequence
  synthetic
uauuccaccaugucacagc

SEQ ID NO: 1160 - RNA, 19 nt, Artificial Sequence
  synthetic
cauuucuauuccaccaugu

SEQ ID NO: 1161 - RNA, 19 nt, Artificial Sequence
  synthetic
ccauuucuauuccaccaug

SEQ ID NO: 1162 - RNA, 19 nt, Artificial Sequence
  synthetic
uccauuucuauuccaccau

SEQ ID NO: 1163 - RNA, 19 nt, Artificial Sequence
  synthetic
guccauuucuauuccacca

SEQ ID NO: 1164 - RNA, 19 nt, Artificial Sequence
  synthetic
gguccauuucuauuccacc

SEQ ID NO: 1165 - RNA, 19 nt, Artificial Sequence
  synthetic
uugucacggguccauuucu

SEQ ID NO: 1166 - RNA, 19 nt, Artificial Sequence
  synthetic
uuggguaguggaccguacu

SEQ ID NO: 1167 - RNA, 19 nt, Artificial Sequence
  synthetic
ucuuguauacuuuugggua

SEQ ID NO: 1168 - RNA, 19 nt, Artificial Sequence
  synthetic
gucuuguauacuuuugggu

SEQ ID NO: 1169 - RNA, 19 nt, Artificial Sequence
  synthetic
agucuuguauacuuuuggg

SEQ ID NO: 1170 - RNA, 19 nt, Artificial Sequence
  synthetic
aagucuuguauacuuuugg

SEQ ID NO: 1171 - RNA, 19 nt, Artificial Sequence
  synthetic
uaagucuuguauacuuuug

SEQ ID NO: 1172 - RNA, 19 nt, Artificial Sequence
  synthetic
aauaagucuuguauacuuu

SEQ ID NO: 1173 - RNA, 19 nt, Artificial Sequence
  synthetic
accuuucgacuuugucaaa

SEQ ID NO: 1174 - RNA, 19 nt, Artificial Sequence
  synthetic
uuccauguuuuaaccuuuc

SEQ ID NO: 1175 - RNA, 19 nt, Artificial Sequence
  synthetic
guuccauguuuuaaccuuu

SEQ ID NO: 1176 - RNA, 19 nt, Artificial Sequence
  synthetic
gguuccauguuuuaaccuu

SEQ ID NO: 1177 - RNA, 19 nt, Artificial Sequence
  synthetic
agguuccauguuuuaaccu

SEQ ID NO: 1178 - RNA, 19 nt, Artificial Sequence
  synthetic
aagguuccauguuuuaacc

SEQ ID NO: 1179 - RNA, 19 nt, Artificial Sequence
  synthetic
aaagguuccauguuuuaac

SEQ ID NO: 1180 - RNA, 19 nt, Artificial Sequence
  synthetic
caaagguuccauguuuuaa

SEQ ID NO: 1181 - RNA, 19 nt, Artificial Sequence
  synthetic
ccaaagguuccauguuuua

SEQ ID NO: 1182 - RNA, 19 nt, Artificial Sequence
  synthetic
gccaaagguuccauguuuu

SEQ ID NO: 1183 - RNA, 19 nt, Artificial Sequence
  synthetic
ggccaaagguuccauguuu

SEQ ID NO: 1184 - RNA, 19 nt, Artificial Sequence
  synthetic
gggccaaagguuccauguu

SEQ ID NO: 1185 - RNA, 19 nt, Artificial Sequence
  synthetic
uucuaaaaugaacagggcc

SEQ ID NO: 1186 - RNA, 19 nt, Artificial Sequence
  synthetic
cuugauuucuaaaaugaac

SEQ ID NO: 1187 - RNA, 19 nt, Artificial Sequence
  synthetic
acuugauuucuaaaaugaa

SEQ ID NO: 1188 - RNA, 19 nt, Artificial Sequence
  synthetic
gacuugauuucuaaaauga

SEQ ID NO: 1189 - RNA, 19 nt, Artificial Sequence
  synthetic
ugacuugauuucuaaaaug

SEQ ID NO: 1190 - RNA, 19 nt, Artificial Sequence
  synthetic
uugacuugauuucuaaaau

SEQ ID NO: 1191 - RNA, 19 nt, Artificial Sequence
  synthetic
cuugacuugauuucuaaaa

SEQ ID NO: 1192 - RNA, 19 nt, Artificial Sequence
  synthetic
ucuugacuugauuucuaaa

SEQ ID NO: 1193 - RNA, 19 nt, Artificial Sequence
  synthetic
aucuugacuugauuucuaa

SEQ ID NO: 1194 - RNA, 19 nt, Artificial Sequence
  synthetic
uaucuugacuugauuucua

SEQ ID NO: 1195 - RNA, 19 nt, Artificial Sequence
  synthetic
guaucuugacuugauuucu

SEQ ID NO: 1196 - RNA, 19 nt, Artificial Sequence
  synthetic
cguaucuugacuugauuuc

SEQ ID NO: 1197 - RNA, 19 nt, Artificial Sequence
  synthetic
gcguaucuugacuugauuu

SEQ ID NO: 1198 - RNA, 19 nt, Artificial Sequence
  synthetic
ggcguaucuugacuugauu

SEQ ID NO: 1199 - RNA, 19 nt, Artificial Sequence
  synthetic
gguuuaugucuacucuucg

SEQ ID NO: 1200 - RNA, 19 nt, Artificial Sequence
  synthetic
ggguuuaugucuacucuuc

SEQ ID NO: 1201 - RNA, 19 nt, Artificial Sequence
  synthetic
aggguuuaugucuacucuu

SEQ ID NO: 1202 - RNA, 19 nt, Artificial Sequence
  synthetic
caggguuuaugucuacucu

SEQ ID NO: 1203 - RNA, 19 nt, Artificial Sequence
  synthetic
ccaggguuuaugucuacuc

SEQ ID NO: 1204 - RNA, 19 nt, Artificial Sequence
  synthetic
caugaccaggguuuauguc

SEQ ID NO: 1205 - RNA, 19 nt, Artificial Sequence
  synthetic
gcaugaccaggguuuaugu

SEQ ID NO: 1206 - RNA, 19 nt, Artificial Sequence
  synthetic
ugaggucugcaugaccagg

SEQ ID NO: 1207 - RNA, 19 nt, Artificial Sequence
  synthetic
cuugugccuccuuggcacu

SEQ ID NO: 1208 - RNA, 19 nt, Artificial Sequence
  synthetic
caacuuccauaauuacauc

SEQ ID NO: 1209 - RNA, 19 nt, Artificial Sequence
  synthetic
acaacuuccauaauuacau

SEQ ID NO: 1210 - RNA, 19 nt, Artificial Sequence
  synthetic
aacaacuuccauaauuaca

SEQ ID NO: 1211 - RNA, 19 nt, Artificial Sequence
  synthetic
aaacaacuuccauaauuac

SEQ ID NO: 1212 - RNA, 19 nt, Artificial Sequence
  synthetic
aaaacaacuuccauaauua

SEQ ID NO: 1213 - RNA, 19 nt, Artificial Sequence
  synthetic
aaaaacaacuuccauaauu

SEQ ID NO: 1214 - RNA, 19 nt, Artificial Sequence
  synthetic
gaaaaacaacuuccauaau

SEQ ID NO: 1215 - RNA, 19 nt, Artificial Sequence
  synthetic
ggaaaaacaacuuccauaa

SEQ ID NO: 1216 - RNA, 19 nt, Artificial Sequence
  synthetic
gggaaaaacaacuuccaua

SEQ ID NO: 1217 - RNA, 19 nt, Artificial Sequence
  synthetic
ugggaaaaacaacuuccau

SEQ ID NO: 1218 - RNA, 19 nt, Artificial Sequence
  synthetic
uugggaaaaacaacuucca

SEQ ID NO: 1219 - RNA, 19 nt, Artificial Sequence
  synthetic
auugggaaaaacaacuucc

SEQ ID NO: 1220 - RNA, 19 nt, Artificial Sequence
  synthetic
cauugggaaaaacaacuuc

SEQ ID NO: 1221 - RNA, 19 nt, Artificial Sequence
  synthetic
ucauugggaaaaacaacuu

SEQ ID NO: 1222 - RNA, 19 nt, Artificial Sequence
  synthetic
acuucauugggaaaaacaa

SEQ ID NO: 1223 - RNA, 19 nt, Artificial Sequence
  synthetic
cacuucauugggaaaaaca

SEQ ID NO: 1224 - RNA, 19 nt, Artificial Sequence
  synthetic
ccacuucauugggaaaaac

SEQ ID NO: 1225 - RNA, 19 nt, Artificial Sequence
  synthetic
cccacuucauugggaaaaa

SEQ ID NO: 1226 - RNA, 19 nt, Artificial Sequence
  synthetic
uuaguauccuggcucccac

SEQ ID NO: 1227 - RNA, 19 nt, Artificial Sequence
  synthetic
guuaguauccuggcuccca

SEQ ID NO: 1228 - RNA, 19 nt, Artificial Sequence
  synthetic
uguuaguauccuggcuccc

SEQ ID NO: 1229 - RNA, 19 nt, Artificial Sequence
  synthetic
auguuaguauccuggcucc

SEQ ID NO: 1230 - RNA, 19 nt, Artificial Sequence
  synthetic
gauguuaguauccuggcuc

SEQ ID NO: 1231 - RNA, 19 nt, Artificial Sequence
  synthetic
ugauguuaguauccuggcu

SEQ ID NO: 1232 - RNA, 19 nt, Artificial Sequence
  synthetic
cugauguuaguauccuggc

SEQ ID NO: 1233 - RNA, 19 nt, Artificial Sequence
  synthetic
ucugauguuaguauccugg

SEQ ID NO: 1234 - RNA, 19 nt, Artificial Sequence
  synthetic
uucugauguuaguauccug

SEQ ID NO: 1235 - RNA, 19 nt, Artificial Sequence
  synthetic
auucugauguuaguauccu

SEQ ID NO: 1236 - RNA, 19 nt, Artificial Sequence
  synthetic
gauucugauguuaguaucc

SEQ ID NO: 1237 - RNA, 19 nt, Artificial Sequence
  synthetic
uuguuaauugugauucuga

SEQ ID NO: 1238 - RNA, 19 nt, Artificial Sequence
  synthetic
cuuuaguuauuguuaauug

SEQ ID NO: 1239 - RNA, 19 nt, Artificial Sequence
  synthetic
ucuuuaguuauuguuaauu

SEQ ID NO: 1240 - RNA, 19 nt, Artificial Sequence
  synthetic
cuuuuuucucuuuaguuau

SEQ ID NO: 1241 - RNA, 19 nt, Artificial Sequence
  synthetic
aaucucggaguucuucuuu

SEQ ID NO: 1242 - RNA, 19 nt, Artificial Sequence
  synthetic
caaucucggaguucuucuu

SEQ ID NO: 1243 - RNA, 19 nt, Artificial Sequence
  synthetic
gcaaucucggaguucuucu

SEQ ID NO: 1244 - RNA, 19 nt, Artificial Sequence
  synthetic
ugcaaucucggaguucuuc

SEQ ID NO: 1245 - RNA, 19 nt, Artificial Sequence
  synthetic
uugcaaucucggaguucuu

SEQ ID NO: 1246 - RNA, 19 nt, Artificial Sequence
  synthetic
uuugcaaucucggaguucu

SEQ ID NO: 1247 - RNA, 19 nt, Artificial Sequence
  synthetic
uuuugcaaucucggaguuc

SEQ ID NO: 1248 - RNA, 19 nt, Artificial Sequence
  synthetic
auuuugcaaucucggaguu

SEQ ID NO: 1249 - RNA, 19 nt, Artificial Sequence
  synthetic
aauuuugcaaucucggagu

SEQ ID NO: 1250 - RNA, 19 nt, Artificial Sequence
  synthetic
aaauuuugcaaucucggag

SEQ ID NO: 1251 - RNA, 19 nt, Artificial Sequence
  synthetic
gaaauuuugcaaucucgga

SEQ ID NO: 1252 - RNA, 19 nt, Artificial Sequence
  synthetic
agaaauuuugcaaucucgg

SEQ ID NO: 1253 - RNA, 19 nt, Artificial Sequence
  synthetic
gagaaauuuugcaaucucg

SEQ ID NO: 1254 - RNA, 19 nt, Artificial Sequence
  synthetic
ggagaaauuuugcaaucuc

SEQ ID NO: 1255 - RNA, 19 nt, Artificial Sequence
  synthetic
gggagaaauuuugcaaucu

SEQ ID NO: 1256 - RNA, 19 nt, Artificial Sequence
  synthetic
agggagaaauuuugcaauc

SEQ ID NO: 1257 - RNA, 19 nt, Artificial Sequence
  synthetic
aagggagaaauuuugcaau

SEQ ID NO: 1258 - RNA, 19 nt, Artificial Sequence
  synthetic
caagggagaaauuuugcaa

SEQ ID NO: 1259 - RNA, 19 nt, Artificial Sequence
  synthetic
ucaagggagaaauuuugca

SEQ ID NO: 1260 - RNA, 19 nt, Artificial Sequence
  synthetic
aucaagggagaaauuuugc

SEQ ID NO: 1261 - RNA, 19 nt, Artificial Sequence
  synthetic
caucaagggagaaauuuug

SEQ ID NO: 1262 - RNA, 19 nt, Artificial Sequence
  synthetic
ccaucaagggagaaauuuu

SEQ ID NO: 1263 - RNA, 19 nt, Artificial Sequence
  synthetic
accaucaagggagaaauuu

SEQ ID NO: 1264 - RNA, 19 nt, Artificial Sequence
  synthetic
aaccaucaagggagaaauu

SEQ ID NO: 1265 - RNA, 19 nt, Artificial Sequence
  synthetic
caaccaucaagggagaaau

SEQ ID NO: 1266 - RNA, 19 nt, Artificial Sequence
  synthetic
gcaaccaucaagggagaaa

SEQ ID NO: 1267 - RNA, 19 nt, Artificial Sequence
  synthetic
ugcaaccaucaagggagaa

SEQ ID NO: 1268 - RNA, 19 nt, Artificial Sequence
  synthetic
augcaaccaucaagggaga

SEQ ID NO: 1269 - RNA, 19 nt, Artificial Sequence
  synthetic
uaugcaaccaucaagggag

SEQ ID NO: 1270 - RNA, 19 nt, Artificial Sequence
  synthetic
guaugcaaccaucaaggga

SEQ ID NO: 1271 - RNA, 19 nt, Artificial Sequence
  synthetic
uguaugcaaccaucaaggg

SEQ ID NO: 1272 - RNA, 19 nt, Artificial Sequence
  synthetic
auguaugcaaccaucaagg

SEQ ID NO: 1273 - RNA, 19 nt, Artificial Sequence
  synthetic
cauguaugcaaccaucaag

SEQ ID NO: 1274 - RNA, 19 nt, Artificial Sequence
  synthetic
acauguaugcaaccaucaa

SEQ ID NO: 1275 - RNA, 19 nt, Artificial Sequence
  synthetic
aacauguaugcaaccauca

SEQ ID NO: 1276 - RNA, 19 nt, Artificial Sequence
  synthetic
uaacauguaugcaaccauc

SEQ ID NO: 1277 - RNA, 19 nt, Artificial Sequence
  synthetic
cuaacauguaugcaaccau

SEQ ID NO: 1278 - RNA, 19 nt, Artificial Sequence
  synthetic
ucuaacauguaugcaacca

SEQ ID NO: 1279 - RNA, 19 nt, Artificial Sequence
  synthetic
cucuaacauguaugcaacc

SEQ ID NO: 1280 - RNA, 19 nt, Artificial Sequence
  synthetic
ucucuaacauguaugcaac

SEQ ID NO: 1281 - RNA, 19 nt, Artificial Sequence
  synthetic
cucucuaacauguaugcaa

SEQ ID NO: 1282 - RNA, 19 nt, Artificial Sequence
  synthetic
ucucucuaacauguaugca

SEQ ID NO: 1283 - RNA, 19 nt, Artificial Sequence
  synthetic
cucucucuaacauguaugc

SEQ ID NO: 1284 - RNA, 19 nt, Artificial Sequence
  synthetic
ucucucucuaacauguaug

SEQ ID NO: 1285 - RNA, 19 nt, Artificial Sequence
  synthetic
uucucucucuaacauguau

SEQ ID NO: 1286 - RNA, 19 nt, Artificial Sequence
  synthetic
guucucucucuaacaugua

SEQ ID NO: 1287 - RNA, 19 nt, Artificial Sequence
  synthetic
aguucucucucuaacaugu

SEQ ID NO: 1288 - RNA, 19 nt, Artificial Sequence
  synthetic
aaguucucucucuaacaug

SEQ ID NO: 1289 - RNA, 19 nt, Artificial Sequence
  synthetic
caaguucucucucuaacau

SEQ ID NO: 1290 - RNA, 19 nt, Artificial Sequence
  synthetic
acaaguucucucucuaaca

SEQ ID NO: 1291 - RNA, 19 nt, Artificial Sequence
  synthetic
uuuuucggacaaguucucu

SEQ ID NO: 1292 - RNA, 19 nt, Artificial Sequence
  synthetic
ggagaaaucuuguuuuucg

SEQ ID NO: 1293 - RNA, 19 nt, Artificial Sequence
  synthetic
gggagaaaucuuguuuuuc

SEQ ID NO: 1294 - RNA, 19 nt, Artificial Sequence
  synthetic
ugggagaaaucuuguuuuu

SEQ ID NO: 1295 - RNA, 19 nt, Artificial Sequence
  synthetic
cugggagaaaucuuguuuu

SEQ ID NO: 1296 - RNA, 19 nt, Artificial Sequence
  synthetic
acugggagaaaucuuguuu

SEQ ID NO: 1297 - RNA, 19 nt, Artificial Sequence
  synthetic
aacugggagaaaucuuguu

SEQ ID NO: 1298 - RNA, 19 nt, Artificial Sequence
  synthetic
caacugggagaaaucuugu

SEQ ID NO: 1299 - RNA, 19 nt, Artificial Sequence
  synthetic
gcaacugggagaaaucuug

SEQ ID NO: 1300 - RNA, 19 nt, Artificial Sequence
  synthetic
agcaacugggagaaaucuu

SEQ ID NO: 1301 - RNA, 19 nt, Artificial Sequence
  synthetic
cagcaacugggagaaaucu

SEQ ID NO: 1302 - RNA, 19 nt, Artificial Sequence
  synthetic
ccagcaacugggagaaauc

SEQ ID NO: 1303 - RNA, 19 nt, Artificial Sequence
  synthetic
gccagcaacugggagaaau

SEQ ID NO: 1304 - RNA, 19 nt, Artificial Sequence
  synthetic
cgccagcaacugggagaaa

SEQ ID NO: 1305 - RNA, 19 nt, Artificial Sequence
  synthetic
ccgccagcaacugggagaa

SEQ ID NO: 1306 - RNA, 19 nt, Artificial Sequence
  synthetic
uccgccagcaacugggaga

SEQ ID NO: 1307 - RNA, 19 nt, Artificial Sequence
  synthetic
uuccgccagcaacugggag

SEQ ID NO: 1308 - RNA, 19 nt, Artificial Sequence
  synthetic
guuccgccagcaacuggga

SEQ ID NO: 1309 - RNA, 19 nt, Artificial Sequence
  synthetic
uguuccgccagcaacuggg

SEQ ID NO: 1310 - RNA, 19 nt, Artificial Sequence
  synthetic
uuguuccgccagcaacugg

SEQ ID NO: 1311 - RNA, 19 nt, Artificial Sequence
  synthetic
cuuguuccgccagcaacug

SEQ ID NO: 1312 - RNA, 19 nt, Artificial Sequence
  synthetic
gcuuguuccgccagcaacu

SEQ ID NO: 1313 - RNA, 19 nt, Artificial Sequence
  synthetic
ugcuuguuccgccagcaac

SEQ ID NO: 1314 - RNA, 19 nt, Artificial Sequence
  synthetic
cugcuuguuccgccagcaa

SEQ ID NO: 1315 - RNA, 19 nt, Artificial Sequence
  synthetic
acugcuuguuccgccagca

SEQ ID NO: 1316 - RNA, 19 nt, Artificial Sequence
  synthetic
uacugcuuguuccgccagc

SEQ ID NO: 1317 - RNA, 19 nt, Artificial Sequence
  synthetic
auacugcuuguuccgccag

SEQ ID NO: 1318 - RNA, 19 nt, Artificial Sequence
  synthetic
uauacugcuuguuccgcca

SEQ ID NO: 1319 - RNA, 19 nt, Artificial Sequence
  synthetic
auauacugcuuguuccgcc

SEQ ID NO: 1320 - RNA, 19 nt, Artificial Sequence
  synthetic
uauauacugcuuguuccgc

SEQ ID NO: 1321 - RNA, 19 nt, Artificial Sequence
  synthetic
guauauacugcuuguuccg

SEQ ID NO: 1322 - RNA, 19 nt, Artificial Sequence
  synthetic
uguauauacugcuuguucc

SEQ ID NO: 1323 - RNA, 19 nt, Artificial Sequence
  synthetic
auguauauacugcuuguuc

SEQ ID NO: 1324 - RNA, 19 nt, Artificial Sequence
  synthetic
aauguauauacugcuuguu

SEQ ID NO: 1325 - RNA, 19 nt, Artificial Sequence
  synthetic
caauguauauacugcuugu

SEQ ID NO: 1326 - RNA, 19 nt, Artificial Sequence
  synthetic
ucaauguauauacugcuug

SEQ ID NO: 1327 - RNA, 19 nt, Artificial Sequence
  synthetic
uucaauguauauacugcuu

SEQ ID NO: 1328 - RNA, 19 nt, Artificial Sequence
  synthetic
cuucaauguauauacugcu

SEQ ID NO: 1329 - RNA, 19 nt, Artificial Sequence
  synthetic
acuucaauguauauacugc

SEQ ID NO: 1330 - RNA, 19 nt, Artificial Sequence
  synthetic
aacuucaauguauauacug

SEQ ID NO: 1331 - RNA, 19 nt, Artificial Sequence
  synthetic
aaacuucaauguauauacu

SEQ ID NO: 1332 - RNA, 19 nt, Artificial Sequence
  synthetic
aaaacuucaauguauauac

SEQ ID NO: 1333 - RNA, 19 nt, Artificial Sequence
  synthetic
guaaaacuucaauguauau

SEQ ID NO: 1334 - RNA, 19 nt, Artificial Sequence
  synthetic
acguuccuugagucaaaug

SEQ ID NO: 1335 - RNA, 19 nt, Artificial Sequence
  synthetic
guucccaacacguuccuug

SEQ ID NO: 1336 - RNA, 19 nt, Artificial Sequence
  synthetic
uguucccaacacguuccuu

SEQ ID NO: 1337 - RNA, 19 nt, Artificial Sequence
  synthetic
uuguucccaacacguuccu

SEQ ID NO: 1338 - RNA, 19 nt, Artificial Sequence
  synthetic
uuuguucccaacacguucc

SEQ ID NO: 1339 - RNA, 19 nt, Artificial Sequence
  synthetic
auuuguucccaacacguuc

SEQ ID NO: 1340 - RNA, 19 nt, Artificial Sequence
  synthetic
cauuuguucccaacacguu

SEQ ID NO: 1341 - RNA, 19 nt, Artificial Sequence
  synthetic
acauuuguucccaacacgu

SEQ ID NO: 1342 - RNA, 19 nt, Artificial Sequence
  synthetic
uacauuuguucccaacacg

SEQ ID NO: 1343 - RNA, 19 nt, Artificial Sequence
  synthetic
guacauuuguucccaacac

SEQ ID NO: 1344 - RNA, 19 nt, Artificial Sequence
  synthetic
uguacauuuguucccaaca

SEQ ID NO: 1345 - RNA, 19 nt, Artificial Sequence
  synthetic
guguacauuuguucccaac

SEQ ID NO: 1346 - RNA, 19 nt, Artificial Sequence
  synthetic
aguguacauuuguucccaa

SEQ ID NO: 1347 - RNA, 19 nt, Artificial Sequence
  synthetic
gaguguacauuuguuccca

SEQ ID NO: 1348 - RNA, 19 nt, Artificial Sequence
  synthetic
ggaguguacauuuguuccc

SEQ ID NO: 1349 - RNA, 19 nt, Artificial Sequence
  synthetic
uggaguguacauuuguucc

SEQ ID NO: 1350 - RNA, 19 nt, Artificial Sequence
  synthetic
cuggaguguacauuuguuc

SEQ ID NO: 1351 - RNA, 19 nt, Artificial Sequence
  synthetic
ccuggaguguacauuuguu

SEQ ID NO: 1352 - RNA, 19 nt, Artificial Sequence
  synthetic
accuggaguguacauuugu

SEQ ID NO: 1353 - RNA, 19 nt, Artificial Sequence
  synthetic
caccuggaguguacauuug

SEQ ID NO: 1354 - RNA, 19 nt, Artificial Sequence
  synthetic
ccaccuggaguguacauuu

SEQ ID NO: 1355 - RNA, 19 nt, Artificial Sequence
  synthetic
uccaccuggaguguacauu

SEQ ID NO: 1356 - RNA, 19 nt, Artificial Sequence
  synthetic
cuccaccuggaguguacau

SEQ ID NO: 1357 - RNA, 19 nt, Artificial Sequence
  synthetic
ucuccaccuggaguguaca

SEQ ID NO: 1358 - RNA, 19 nt, Artificial Sequence
  synthetic
uucuccaccuggaguguac

SEQ ID NO: 1359 - RNA, 19 nt, Artificial Sequence
  synthetic
cuucuccaccuggagugua

SEQ ID NO: 1360 - RNA, 19 nt, Artificial Sequence
  synthetic
acuucuccaccuggagugu

SEQ ID NO: 1361 - RNA, 19 nt, Artificial Sequence
  synthetic
cacuucuccaccuggagug

SEQ ID NO: 1362 - RNA, 19 nt, Artificial Sequence
  synthetic
ucacuucuccaccuggagu

SEQ ID NO: 1363 - RNA, 19 nt, Artificial Sequence
  synthetic
cucacuucuccaccuggag

SEQ ID NO: 1364 - RNA, 19 nt, Artificial Sequence
  synthetic
ccucacuucuccaccugga

SEQ ID NO: 1365 - RNA, 19 nt, Artificial Sequence
  synthetic
uccucacuucuccaccugg

SEQ ID NO: 1366 - RNA, 19 nt, Artificial Sequence
  synthetic
uuccucacuucuccaccug

SEQ ID NO: 1367 - RNA, 19 nt, Artificial Sequence
  synthetic
auuccucacuucuccaccu

SEQ ID NO: 1368 - RNA, 19 nt, Artificial Sequence
  synthetic
cauuccucacuucuccacc

SEQ ID NO: 1369 - RNA, 19 nt, Artificial Sequence
  synthetic
ucauuccucacuucuccac

SEQ ID NO: 1370 - RNA, 19 nt, Artificial Sequence
  synthetic
gucauuccucacuucucca

SEQ ID NO: 1371 - RNA, 19 nt, Artificial Sequence
  synthetic
cgucauuccucacuucucc

SEQ ID NO: 1372 - RNA, 19 nt, Artificial Sequence
  synthetic
ucgucauuccucacuucuc

SEQ ID NO: 1373 - RNA, 19 nt, Artificial Sequence
  synthetic
aucgucauuccucacuucu

SEQ ID NO: 1374 - RNA, 19 nt, Artificial Sequence
  synthetic
caucgucauuccucacuuc

SEQ ID NO: 1375 - RNA, 19 nt, Artificial Sequence
  synthetic
acaucgucauuccucacuu

SEQ ID NO: 1376 - RNA, 19 nt, Artificial Sequence
  synthetic
aacaucgucauuccucacu

SEQ ID NO: 1377 - RNA, 19 nt, Artificial Sequence
  synthetic
caacaucgucauuccucac

SEQ ID NO: 1378 - RNA, 19 nt, Artificial Sequence
  synthetic
ucaacaucgucauuccuca

SEQ ID NO: 1379 - RNA, 19 nt, Artificial Sequence
  synthetic
ggucaacaucgucauuccu

SEQ ID NO: 1380 - RNA, 19 nt, Artificial Sequence
  synthetic
cugcaauaauuaggcuuug

SEQ ID NO: 1381 - RNA, 19 nt, Artificial Sequence
  synthetic
uucuuacuauguuccuggc

SEQ ID NO: 1382 - RNA, 19 nt, Artificial Sequence
  synthetic
cucuucuuacuauguuccu

SEQ ID NO: 1383 - RNA, 19 nt, Artificial Sequence
  synthetic
gcucuucuuacuauguucc

SEQ ID NO: 1384 - RNA, 19 nt, Artificial Sequence
  synthetic
cugcugauacugcggcucu

SEQ ID NO: 1385 - RNA, 19 nt, Artificial Sequence
  synthetic
auaaagaugcuaguggauc

SEQ ID NO: 1386 - RNA, 19 nt, Artificial Sequence
  synthetic
ccaauaaagaugcuagugg

SEQ ID NO: 1387 - RNA, 19 nt, Artificial Sequence
  synthetic
uccaauaaagaugcuagug

SEQ ID NO: 1388 - RNA, 19 nt, Artificial Sequence
  synthetic
cuccaauaaagaugcuagu

SEQ ID NO: 1389 - RNA, 19 nt, Artificial Sequence
  synthetic
ucuccaauaaagaugcuag

SEQ ID NO: 1390 - RNA, 19 nt, Artificial Sequence
  synthetic
aucuccaauaaagaugcua

SEQ ID NO: 1391 - RNA, 19 nt, Artificial Sequence
  synthetic
caucuccaauaaagaugcu

SEQ ID NO: 1392 - RNA, 19 nt, Artificial Sequence
  synthetic
acaucuccaauaaagaugc

SEQ ID NO: 1393 - RNA, 19 nt, Artificial Sequence
  synthetic
cacaucuccaauaaagaug

SEQ ID NO: 1394 - RNA, 19 nt, Artificial Sequence
  synthetic
gcacaucuccaauaaagau

SEQ ID NO: 1395 - RNA, 19 nt, Artificial Sequence
  synthetic
ggcacaucuccaauaaaga

SEQ ID NO: 1396 - RNA, 19 nt, Artificial Sequence
  synthetic
uggcacaucuccaauaaag

SEQ ID NO: 1397 - RNA, 19 nt, Artificial Sequence
  synthetic
guggcacaucuccaauaaa

SEQ ID NO: 1398 - RNA, 19 nt, Artificial Sequence
  synthetic
uguggcacaucuccaauaa

SEQ ID NO: 1399 - RNA, 19 nt, Artificial Sequence
  synthetic
cuguggcacaucuccaaua

SEQ ID NO: 1400 - RNA, 19 nt, Artificial Sequence
  synthetic
gcuguggcacaucuccaau

SEQ ID NO: 1401 - RNA, 19 nt, Artificial Sequence
  synthetic
ugcuguggcacaucuccaa

SEQ ID NO: 1402 - RNA, 19 nt, Artificial Sequence
  synthetic
gugcuguggcacaucucca

SEQ ID NO: 1403 - RNA, 19 nt, Artificial Sequence
  synthetic
ugugcuguggcacaucucc

SEQ ID NO: 1404 - RNA, 19 nt, Artificial Sequence
  synthetic
gugugcuguggcacaucuc

SEQ ID NO: 1405 - RNA, 19 nt, Artificial Sequence
  synthetic
ugugugcuguggcacaucu

SEQ ID NO: 1406 - RNA, 19 nt, Artificial Sequence
  synthetic
uugugugcuguggcacauc

SEQ ID NO: 1407 - RNA, 19 nt, Artificial Sequence
  synthetic
uuugugugcuguggcacau

SEQ ID NO: 1408 - RNA, 19 nt, Artificial Sequence
  synthetic
auuugugugcuguggcaca

SEQ ID NO: 1409 - RNA, 19 nt, Artificial Sequence
  synthetic
aauuugugugcuguggcac

SEQ ID NO: 1410 - RNA, 19 nt, Artificial Sequence
  synthetic
caauuugugugcuguggca

SEQ ID NO: 1411 - RNA, 19 nt, Artificial Sequence
  synthetic
ccaauuugugugcuguggc

SEQ ID NO: 1412 - RNA, 19 nt, Artificial Sequence
  synthetic
gccaauuugugugcugugg

SEQ ID NO: 1413 - RNA, 19 nt, Artificial Sequence
  synthetic
cgccaauuugugugcugug

SEQ ID NO: 1414 - RNA, 19 nt, Artificial Sequence
  synthetic
ccgccaauuugugugcugu

SEQ ID NO: 1415 - RNA, 19 nt, Artificial Sequence
  synthetic
cccgccaauuugugugcug

SEQ ID NO: 1416 - RNA, 19 nt, Artificial Sequence
  synthetic
ucccgccaauuugugugcu

SEQ ID NO: 1417 - RNA, 19 nt, Artificial Sequence
  synthetic
gucccgccaauuugugugc

SEQ ID NO: 1418 - RNA, 19 nt, Artificial Sequence
  synthetic
ugucccgccaauuugugug

SEQ ID NO: 1419 - RNA, 19 nt, Artificial Sequence
  synthetic
uugucccgccaauuugugu

SEQ ID NO: 1420 - RNA, 19 nt, Artificial Sequence
  synthetic
uaagaauguccaccauccu

SEQ ID NO: 1421 - RNA, 19 nt, Artificial Sequence
  synthetic
cuucagucggguucugccu

SEQ ID NO: 1422 - RNA, 19 nt, Artificial Sequence
  synthetic
ccacagcuuguucuucagu

SEQ ID NO: 1423 - RNA, 19 nt, Artificial Sequence
  synthetic
uccacagcuuguucuucag

SEQ ID NO: 1424 - RNA, 19 nt, Artificial Sequence
  synthetic
auccacagcuuguucuuca

SEQ ID NO: 1425 - RNA, 19 nt, Artificial Sequence
  synthetic
uauccacagcuuguucuuc

SEQ ID NO: 1426 - RNA, 19 nt, Artificial Sequence
  synthetic
auauccacagcuuguucuu

SEQ ID NO: 1427 - RNA, 19 nt, Artificial Sequence
  synthetic
uauauccacagcuuguucu

SEQ ID NO: 1428 - RNA, 19 nt, Artificial Sequence
  synthetic
auauauccacagcuuguuc

SEQ ID NO: 1429 - RNA, 19 nt, Artificial Sequence
  synthetic
cauauauccacagcuuguu

SEQ ID NO: 1430 - RNA, 19 nt, Artificial Sequence
  synthetic
gcauauauccacagcuugu

SEQ ID NO: 1431 - RNA, 19 nt, Artificial Sequence
  synthetic
ugcauauauccacagcuug

SEQ ID NO: 1432 - RNA, 19 nt, Artificial Sequence
  synthetic
uugcauauauccacagcuu

SEQ ID NO: 1433 - RNA, 19 nt, Artificial Sequence
  synthetic
cuugcauauauccacagcu

SEQ ID NO: 1434 - RNA, 19 nt, Artificial Sequence
  synthetic
ccuugcauauauccacagc

SEQ ID NO: 1435 - RNA, 19 nt, Artificial Sequence
  synthetic
gccuugcauauauccacag

SEQ ID NO: 1436 - RNA, 19 nt, Artificial Sequence
  synthetic
agccuugcauauauccaca

SEQ ID NO: 1437 - RNA, 19 nt, Artificial Sequence
  synthetic
cagccuugcauauauccac

SEQ ID NO: 1438 - RNA, 19 nt, Artificial Sequence
  synthetic
gcagccuugcauauaucca

SEQ ID NO: 1439 - RNA, 19 nt, Artificial Sequence
  synthetic
ugcagccuugcauauaucc

SEQ ID NO: 1440 - RNA, 19 nt, Artificial Sequence
  synthetic
uugcagccuugcauauauc

SEQ ID NO: 1441 - RNA, 19 nt, Artificial Sequence
  synthetic
auugcagccuugcauauau

SEQ ID NO: 1442 - RNA, 19 nt, Artificial Sequence
  synthetic
cauugcagccuugcauaua

SEQ ID NO: 1443 - RNA, 19 nt, Artificial Sequence
  synthetic
ccauugcagccuugcauau

SEQ ID NO: 1444 - RNA, 19 nt, Artificial Sequence
  synthetic
cccauugcagccuugcaua

SEQ ID NO: 1445 - RNA, 19 nt, Artificial Sequence
  synthetic
accccauugcagccuugca

SEQ ID NO: 1446 - RNA, 19 nt, Artificial Sequence
  synthetic
aggaugagcugauucucaa

SEQ ID NO: 1447 - RNA, 19 nt, Artificial Sequence
  synthetic
aaggaugagcugauucuca

SEQ ID NO: 1448 - RNA, 19 nt, Artificial Sequence
  synthetic
gaaggaugagcugauucuc

SEQ ID NO: 1449 - RNA, 19 nt, Artificial Sequence
  synthetic
ugaaggaugagcugauucu

SEQ ID NO: 1450 - RNA, 19 nt, Artificial Sequence
  synthetic
cugaaggaugagcugauuc

SEQ ID NO: 1451 - RNA, 19 nt, Artificial Sequence
  synthetic
gcugaaggaugagcugauu

SEQ ID NO: 1452 - RNA, 19 nt, Artificial Sequence
  synthetic
agcugaaggaugagcugau

SEQ ID NO: 1453 - RNA, 19 nt, Artificial Sequence
  synthetic
aagcugaaggaugagcuga

SEQ ID NO: 1454 - RNA, 19 nt, Artificial Sequence
  synthetic
aaagcugaaggaugagcug

SEQ ID NO: 1455 - RNA, 19 nt, Artificial Sequence
  synthetic
caaagcugaaggaugagcu

SEQ ID NO: 1456 - RNA, 19 nt, Artificial Sequence
  synthetic
ccaaagcugaaggaugagc

SEQ ID NO: 1457 - RNA, 19 nt, Artificial Sequence
  synthetic
accaaagcugaaggaugag

SEQ ID NO: 1458 - RNA, 19 nt, Artificial Sequence
  synthetic
caccaaagcugaaggauga

SEQ ID NO: 1459 - RNA, 19 nt, Artificial Sequence
  synthetic
ccaccaaagcugaaggaug

SEQ ID NO: 1460 - RNA, 19 nt, Artificial Sequence
  synthetic
uaaauccaccaaagcugaa

SEQ ID NO: 1461 - RNA, 19 nt, Artificial Sequence
  synthetic
cgcuuguucuuuuaaaugu

SEQ ID NO: 1462 - RNA, 19 nt, Artificial Sequence
  synthetic
cucuuuugacugaugaccc

SEQ ID NO: 1463 - RNA, 19 nt, Artificial Sequence
  synthetic
cuguaagcacuucuuccuc

SEQ ID NO: 1464 - RNA, 19 nt, Artificial Sequence
  synthetic
ugccuguaagcacuucuuc

SEQ ID NO: 1465 - RNA, 19 nt, Artificial Sequence
  synthetic
uugccuguaagcacuucuu

SEQ ID NO: 1466 - RNA, 19 nt, Artificial Sequence
  synthetic
auugccuguaagcacuucu

SEQ ID NO: 1467 - RNA, 19 nt, Artificial Sequence
  synthetic
gauugccuguaagcacuuc

SEQ ID NO: 1468 - RNA, 19 nt, Artificial Sequence
  synthetic
agauugccuguaagcacuu

SEQ ID NO: 1469 - RNA, 19 nt, Artificial Sequence
  synthetic
gagauugccuguaagcacu

SEQ ID NO: 1470 - RNA, 19 nt, Artificial Sequence
  synthetic
ggagauugccuguaagcac

SEQ ID NO: 1471 - RNA, 19 nt, Artificial Sequence
  synthetic
uggagauugccuguaagca

SEQ ID NO: 1472 - RNA, 19 nt, Artificial Sequence
  synthetic
uuggagauugccuguaagc

SEQ ID NO: 1473 - RNA, 19 nt, Artificial Sequence
  synthetic
uuuggagauugccuguaag

SEQ ID NO: 1474 - RNA, 19 nt, Artificial Sequence
  synthetic
guuuggagauugccuguaa

SEQ ID NO: 1475 - RNA, 19 nt, Artificial Sequence
  synthetic
uguuuggagauugccugua

SEQ ID NO: 1476 - RNA, 19 nt, Artificial Sequence
  synthetic
auguuuggagauugccugu

SEQ ID NO: 1477 - RNA, 19 nt, Artificial Sequence
  synthetic
aauguuuggagauugccug

SEQ ID NO: 1478 - RNA, 19 nt, Artificial Sequence
  synthetic
caauguuuggagauugccu

SEQ ID NO: 1479 - RNA, 19 nt, Artificial Sequence
  synthetic
ucaauguuuggagauugcc

SEQ ID NO: 1480 - RNA, 19 nt, Artificial Sequence
  synthetic
uucaauguuuggagauugc

SEQ ID NO: 1481 - RNA, 19 nt, Artificial Sequence
  synthetic
ccucauguacucuuauuuu

SEQ ID NO: 1482 - RNA, 19 nt, Artificial Sequence
  synthetic
uugugaacuccucauaccc

SEQ ID NO: 1483 - RNA, 19 nt, Artificial Sequence
  synthetic
ccauugugaacuccucaua

SEQ ID NO: 1484 - RNA, 19 nt, Artificial Sequence
  synthetic
accauugugaacuccucau

SEQ ID NO: 1485 - RNA, 19 nt, Artificial Sequence
  synthetic
caccauugugaacuccuca

SEQ ID NO: 1486 - RNA, 19 nt, Artificial Sequence
  synthetic
ccaccauugugaacuccuc

SEQ ID NO: 1487 - RNA, 19 nt, Artificial Sequence
  synthetic
cccaccauugugaacuccu

SEQ ID NO: 1488 - RNA, 19 nt, Artificial Sequence
  synthetic
uuuuccccaccauugugaa

SEQ ID NO: 1489 - RNA, 19 nt, Artificial Sequence
  synthetic
cuuuuccccaccauuguga

SEQ ID NO: 1490 - RNA, 19 nt, Artificial Sequence
  synthetic
uugcucuuuuccccaccau

SEQ ID NO: 1491 - RNA, 19 nt, Artificial Sequence
  synthetic
guugcucuuuuccccacca

SEQ ID NO: 1492 - RNA, 19 nt, Artificial Sequence
  synthetic
uguugcucuuuuccccacc

SEQ ID NO: 1493 - RNA, 19 nt, Artificial Sequence
  synthetic
cuguugcucuuuuccccac

SEQ ID NO: 1494 - RNA, 19 nt, Artificial Sequence
  synthetic
gcuguugcucuuuucccca

SEQ ID NO: 1495 - RNA, 19 nt, Artificial Sequence
  synthetic
agcuguugcucuuuucccc

SEQ ID NO: 1496 - RNA, 19 nt, Artificial Sequence
  synthetic
uagcuguugcucuuuuccc

SEQ ID NO: 1497 - RNA, 19 nt, Artificial Sequence
  synthetic
auagcuguugcucuuuucc

SEQ ID NO: 1498 - RNA, 19 nt, Artificial Sequence
  synthetic
uauagcuguugcucuuuuc

SEQ ID NO: 1499 - RNA, 19 nt, Artificial Sequence
  synthetic
guauagcuguugcucuuuu

SEQ ID NO: 1500 - RNA, 19 nt, Artificial Sequence
  synthetic
aguauagcuguugcucuuu

SEQ ID NO: 1501 - RNA, 19 nt, Artificial Sequence
  synthetic
cuuuucugaguauagcugu

SEQ ID NO: 1502 - RNA, 19 nt, Artificial Sequence
  synthetic
gaaccaaucuccugguugc

SEQ ID NO: 1503 - RNA, 19 nt, Artificial Sequence
  synthetic
uuccacucacuaugagcug

SEQ ID NO: 1504 - RNA, 19 nt, Artificial Sequence
  synthetic
cuauugacuguucgucccu

SEQ ID NO: 1505 - RNA, 19 nt, Artificial Sequence
  synthetic
ccacgauuauugcuucggc

SEQ ID NO: 1506 - RNA, 19 nt, Artificial Sequence
  synthetic
gugaaaacaccauggccac

SEQ ID NO: 1507 - RNA, 19 nt, Artificial Sequence
  synthetic
ugugaaaacaccauggcca

SEQ ID NO: 1508 - RNA, 19 nt, Artificial Sequence
  synthetic
uugugaaaacaccauggcc

SEQ ID NO: 1509 - RNA, 19 nt, Artificial Sequence
  synthetic
cuugugaaaacaccauggc

SEQ ID NO: 1510 - RNA, 19 nt, Artificial Sequence
  synthetic
ucuugugaaaacaccaugg

SEQ ID NO: 1511 - RNA, 19 nt, Artificial Sequence
  synthetic
cucuugugaaaacaccaug

SEQ ID NO: 1512 - RNA, 19 nt, Artificial Sequence
  synthetic
ccucuugugaaaacaccau

SEQ ID NO: 1513 - RNA, 19 nt, Artificial Sequence
  synthetic
uccucuugugaaaacacca

SEQ ID NO: 1514 - RNA, 19 nt, Artificial Sequence
  synthetic
auccucuugugaaaacacc

SEQ ID NO: 1515 - RNA, 19 nt, Artificial Sequence
  synthetic
aauccucuugugaaaacac

SEQ ID NO: 1516 - RNA, 19 nt, Artificial Sequence
  synthetic
caauccucuugugaaaaca

SEQ ID NO: 1517 - RNA, 19 nt, Artificial Sequence
  synthetic
gcaauccucuugugaaaac

SEQ ID NO: 1518 - RNA, 19 nt, Artificial Sequence
  synthetic
ugcaauccucuugugaaaa

SEQ ID NO: 1519 - RNA, 19 nt, Artificial Sequence
  synthetic
augcaauccucuugugaaa

SEQ ID NO: 1520 - RNA, 19 nt, Artificial Sequence
  synthetic
caugcaauccucuugugaa

SEQ ID NO: 1521 - RNA, 19 nt, Artificial Sequence
  synthetic
ucaugcaauccucuuguga

SEQ ID NO: 1522 - RNA, 19 nt, Artificial Sequence
  synthetic
aucaugcaauccucuugug

SEQ ID NO: 1523 - RNA, 19 nt, Artificial Sequence
  synthetic
uaucaugcaauccucuugu

SEQ ID NO: 1524 - RNA, 19 nt, Artificial Sequence
  synthetic
uuaucaugcaauccucuug

SEQ ID NO: 1525 - RNA, 19 nt, Artificial Sequence
  synthetic
uuuaucaugcaauccucuu

SEQ ID NO: 1526 - RNA, 19 nt, Artificial Sequence
  synthetic
uuuuaucaugcaauccucu

SEQ ID NO: 1527 - RNA, 19 nt, Artificial Sequence
  synthetic
cuuuuaucaugcaauccuc

SEQ ID NO: 1528 - RNA, 19 nt, Artificial Sequence
  synthetic
gcuuuuaucaugcaauccu

SEQ ID NO: 1529 - RNA, 19 nt, Artificial Sequence
  synthetic
ugcuuuuaucaugcaaucc

SEQ ID NO: 1530 - RNA, 19 nt, Artificial Sequence
  synthetic
cugcuuuuaucaugcaauc

SEQ ID NO: 1531 - RNA, 19 nt, Artificial Sequence
  synthetic
acugcuuuuaucaugcaau

SEQ ID NO: 1532 - RNA, 19 nt, Artificial Sequence
  synthetic
aacugcuuuuaucaugcaa

SEQ ID NO: 1533 - RNA, 19 nt, Artificial Sequence
  synthetic
uaacugcuuuuaucaugca

SEQ ID NO: 1534 - RNA, 19 nt, Artificial Sequence
  synthetic
cuaacugcuuuuaucaugc

SEQ ID NO: 1535 - RNA, 19 nt, Artificial Sequence
  synthetic
ucuaacugcuuuuaucaug

SEQ ID NO: 1536 - RNA, 19 nt, Artificial Sequence
  synthetic
cucuaacugcuuuuaucau

SEQ ID NO: 1537 - RNA, 19 nt, Artificial Sequence
  synthetic
ccucuaacugcuuuuauca

SEQ ID NO: 1538 - RNA, 19 nt, Artificial Sequence
  synthetic
accucuaacugcuuuuauc

SEQ ID NO: 1539 - RNA, 19 nt, Artificial Sequence
  synthetic
caccucuaacugcuuuuau

SEQ ID NO: 1540 - RNA, 19 nt, Artificial Sequence
  synthetic
ucaccucuaacugcuuuua

SEQ ID NO: 1541 - RNA, 19 nt, Artificial Sequence
  synthetic
gucaccucuaacugcuuuu

SEQ ID NO: 1542 - RNA, 19 nt, Artificial Sequence
  synthetic
ggucaccucuaacugcuuu

SEQ ID NO: 1543 - RNA, 19 nt, Artificial Sequence
  synthetic
aggucaccucuaacugcuu

SEQ ID NO: 1544 - RNA, 19 nt, Artificial Sequence
  synthetic
caggucaccucuaacugcu

SEQ ID NO: 1545 - RNA, 19 nt, Artificial Sequence
  synthetic
ucaggucaccucuaacugc

SEQ ID NO: 1546 - RNA, 19 nt, Artificial Sequence
  synthetic
uucaggucaccucuaacug

SEQ ID NO: 1547 - RNA, 19 nt, Artificial Sequence
  synthetic
auucaggucaccucuaacu

SEQ ID NO: 1548 - RNA, 19 nt, Artificial Sequence
  synthetic
aauucaggucaccucuaac

SEQ ID NO: 1549 - RNA, 19 nt, Artificial Sequence
  synthetic
aaauucaggucaccucuaa

SEQ ID NO: 1550 - RNA, 19 nt, Artificial Sequence
  synthetic
gaaauucaggucaccucua

SEQ ID NO: 1551 - RNA, 19 nt, Artificial Sequence
  synthetic
cgaaauucaggucaccucu

SEQ ID NO: 1552 - RNA, 19 nt, Artificial Sequence
  synthetic
acgaaauucaggucaccuc

SEQ ID NO: 1553 - RNA, 19 nt, Artificial Sequence
  synthetic
gacgaaauucaggucaccu

SEQ ID NO: 1554 - RNA, 19 nt, Artificial Sequence
  synthetic
ugacgaaauucaggucacc

SEQ ID NO: 1555 - RNA, 19 nt, Artificial Sequence
  synthetic
uugacgaaauucaggucac

SEQ ID NO: 1556 - RNA, 19 nt, Artificial Sequence
  synthetic
guugacgaaauucagguca

SEQ ID NO: 1557 - RNA, 19 nt, Artificial Sequence
  synthetic
uguugacgaaauucagguc

SEQ ID NO: 1558 - RNA, 19 nt, Artificial Sequence
  synthetic
cuguugacgaaauucaggu

SEQ ID NO: 1559 - RNA, 19 nt, Artificial Sequence
  synthetic
uugcccuguugacgaaauu

SEQ ID NO: 1560 - RNA, 19 nt, Artificial Sequence
  synthetic
ugggguucaaccgcugguu

SEQ ID NO: 1561 - RNA, 19 nt, Artificial Sequence
  synthetic
gccuuaaaagcugaugcau

SEQ ID NO: 1562 - RNA, 19 nt, Artificial Sequence
  synthetic
ucugaaaaugccuuaaaag

SEQ ID NO: 1563 - RNA, 19 nt, Artificial Sequence
  synthetic
uucugaaaaugccuuaaaa

SEQ ID NO: 1564 - RNA, 19 nt, Artificial Sequence
  synthetic
uuucugaaaaugccuuaaa

SEQ ID NO: 1565 - RNA, 19 nt, Artificial Sequence
  synthetic
cuuucugaaaaugccuuaa

SEQ ID NO: 1566 - RNA, 19 nt, Artificial Sequence
  synthetic
ucuuucugaaaaugccuua

SEQ ID NO: 1567 - RNA, 19 nt, Artificial Sequence
  synthetic
aucuuucugaaaaugccuu

SEQ ID NO: 1568 - RNA, 19 nt, Artificial Sequence
  synthetic
caucuuucugaaaaugccu

SEQ ID NO: 1569 - RNA, 19 nt, Artificial Sequence
  synthetic
gcaucuuucugaaaaugcc

SEQ ID NO: 1570 - RNA, 19 nt, Artificial Sequence
  synthetic
ucgcaucuuucugaaaaug

SEQ ID NO: 1571 - RNA, 19 nt, Artificial Sequence
  synthetic
aauucugaaaaagcacuuu

SEQ ID NO: 1572 - RNA, 19 nt, Artificial Sequence
  synthetic
cgauguguucaauucccca

SEQ ID NO: 1573 - RNA, 19 nt, Artificial Sequence
  synthetic
ccauucccaucacacuguc

SEQ ID NO: 1574 - RNA, 19 nt, Artificial Sequence
  synthetic
uaucugguaauacuccaac

SEQ ID NO: 1575 - RNA, 19 nt, Artificial Sequence
  synthetic
auaucugguaauacuccaa

SEQ ID NO: 1576 - RNA, 19 nt, Artificial Sequence
  synthetic
cauaucugguaauacucca

SEQ ID NO: 1577 - RNA, 19 nt, Artificial Sequence
  synthetic
ucauaucugguaauacucc

SEQ ID NO: 1578 - RNA, 19 nt, Artificial Sequence
  synthetic
gucauaucugguaauacuc

SEQ ID NO: 1579 - RNA, 19 nt, Artificial Sequence
  synthetic
ggagucauaucugguaaua

SEQ ID NO: 1580 - RNA, 19 nt, Artificial Sequence
  synthetic
uggagucauaucugguaau

SEQ ID NO: 1581 - RNA, 19 nt, Artificial Sequence
  synthetic
uuggagucauaucugguaa

SEQ ID NO: 1582 - RNA, 19 nt, Artificial Sequence
  synthetic
cuuggagucauaucuggua

SEQ ID NO: 1583 - RNA, 19 nt, Artificial Sequence
  synthetic
gcuuggagucauaucuggu

SEQ ID NO: 1584 - RNA, 19 nt, Artificial Sequence
  synthetic
ugcuuggagucauaucugg

SEQ ID NO: 1585 - RNA, 19 nt, Artificial Sequence
  synthetic
gugcuuggagucauaucug

SEQ ID NO: 1586 - RNA, 19 nt, Artificial Sequence
  synthetic
ugugcuuggagucauaucu

SEQ ID NO: 1587 - RNA, 19 nt, Artificial Sequence
  synthetic
cugugcuuggagucauauc

SEQ ID NO: 1588 - RNA, 19 nt, Artificial Sequence
  synthetic
ucugugcuuggagucauau

SEQ ID NO: 1589 - RNA, 19 nt, Artificial Sequence
  synthetic
ucucugugcuuggagucau

SEQ ID NO: 1590 - RNA, 19 nt, Artificial Sequence
  synthetic
aucucugugcuuggaguca

SEQ ID NO: 1591 - RNA, 19 nt, Artificial Sequence
  synthetic
caucucugugcuuggaguc

SEQ ID NO: 1592 - RNA, 19 nt, Artificial Sequence
  synthetic
acaucucugugcuuggagu

SEQ ID NO: 1593 - RNA, 19 nt, Artificial Sequence
  synthetic
gacaucucugugcuuggag

SEQ ID NO: 1594 - RNA, 19 nt, Artificial Sequence
  synthetic
ugacaucucugugcuugga

SEQ ID NO: 1595 - RNA, 19 nt, Artificial Sequence
  synthetic
uugacaucucugugcuugg

SEQ ID NO: 1596 - RNA, 19 nt, Artificial Sequence
  synthetic
auugacaucucugugcuug

SEQ ID NO: 1597 - RNA, 19 nt, Artificial Sequence
  synthetic
cauugacaucucugugcuu

SEQ ID NO: 1598 - RNA, 19 nt, Artificial Sequence
  synthetic
ucauugacaucucugugcu

SEQ ID NO: 1599 - RNA, 19 nt, Artificial Sequence
  synthetic
cucauugacaucucugugc

SEQ ID NO: 1600 - RNA, 19 nt, Artificial Sequence
  synthetic
ucucauugacaucucugug

SEQ ID NO: 1601 - RNA, 19 nt, Artificial Sequence
  synthetic
cucucauugacaucucugu

SEQ ID NO: 1602 - RNA, 19 nt, Artificial Sequence
  synthetic
ccucucauugacaucucug

SEQ ID NO: 1603 - RNA, 19 nt, Artificial Sequence
  synthetic
uccucucauugacaucucu

SEQ ID NO: 1604 - RNA, 19 nt, Artificial Sequence
  synthetic
uuccucucauugacaucuc

SEQ ID NO: 1605 - RNA, 19 nt, Artificial Sequence
  synthetic
auuccucucauugacaucu

SEQ ID NO: 1606 - RNA, 19 nt, Artificial Sequence
  synthetic
uauuccucucauugacauc

SEQ ID NO: 1607 - RNA, 19 nt, Artificial Sequence
  synthetic
uuauuccucucauugacau

SEQ ID NO: 1608 - RNA, 19 nt, Artificial Sequence
  synthetic
cuuauuccucucauugaca

SEQ ID NO: 1609 - RNA, 19 nt, Artificial Sequence
  synthetic
ucuuauuccucucauugac

SEQ ID NO: 1610 - RNA, 19 nt, Artificial Sequence
  synthetic
cucuuauuccucucauuga

SEQ ID NO: 1611 - RNA, 19 nt, Artificial Sequence
  synthetic
acucuuauuccucucauug

SEQ ID NO: 1612 - RNA, 19 nt, Artificial Sequence
  synthetic
gacucuuauuccucucauu

SEQ ID NO: 1613 - RNA, 19 nt, Artificial Sequence
  synthetic
ugacucuuauuccucucau

SEQ ID NO: 1614 - RNA, 19 nt, Artificial Sequence
  synthetic
cugacucuuauuccucuca

SEQ ID NO: 1615 - RNA, 19 nt, Artificial Sequence
  synthetic
gcugacucuuauuccucuc

SEQ ID NO: 1616 - RNA, 19 nt, Artificial Sequence
  synthetic
ugcugacucuuauuccucu

SEQ ID NO: 1617 - RNA, 19 nt, Artificial Sequence
  synthetic
uugcugacucuuauuccuc

SEQ ID NO: 1618 - RNA, 19 nt, Artificial Sequence
  synthetic
uuugcugacucuuauuccu

SEQ ID NO: 1619 - RNA, 19 nt, Artificial Sequence
  synthetic
uuuugcugacucuuauucc

SEQ ID NO: 1620 - RNA, 19 nt, Artificial Sequence
  synthetic
auuuugcugacucuuauuc

SEQ ID NO: 1621 - RNA, 19 nt, Artificial Sequence
  synthetic
cauuuugcugacucuuauu

SEQ ID NO: 1622 - RNA, 19 nt, Artificial Sequence
  synthetic
ccauuuugcugacucuuau

SEQ ID NO: 1623 - RNA, 19 nt, Artificial Sequence
  synthetic
cccauuuugcugacucuua

SEQ ID NO: 1624 - RNA, 19 nt, Artificial Sequence
  synthetic
acccauuuugcugacucuu

SEQ ID NO: 1625 - RNA, 19 nt, Artificial Sequence
  synthetic
cacccauuuugcugacucu

SEQ ID NO: 1626 - RNA, 19 nt, Artificial Sequence
  synthetic
acacccauuuugcugacuc

SEQ ID NO: 1627 - RNA, 19 nt, Artificial Sequence
  synthetic
cacacccauuuugcugacu

SEQ ID NO: 1628 - RNA, 19 nt, Artificial Sequence
  synthetic
ccacacccauuuugcugac

SEQ ID NO: 1629 - RNA, 19 nt, Artificial Sequence
  synthetic
uccacacccauuuugcuga

SEQ ID NO: 1630 - RNA, 19 nt, Artificial Sequence
  synthetic
auccacacccauuuugcug

SEQ ID NO: 1631 - RNA, 19 nt, Artificial Sequence
  synthetic
cauccacacccauuuugcu

SEQ ID NO: 1632 - RNA, 19 nt, Artificial Sequence
  synthetic
ucauccacacccauuuugc

SEQ ID NO: 1633 - RNA, 19 nt, Artificial Sequence
  synthetic
uucauccacacccauuuug

SEQ ID NO: 1634 - RNA, 19 nt, Artificial Sequence
  synthetic
auucauccacacccauuuu

SEQ ID NO: 1635 - RNA, 19 nt, Artificial Sequence
  synthetic
uauucauccacacccauuu

SEQ ID NO: 1636 - RNA, 19 nt, Artificial Sequence
  synthetic
guauucauccacacccauu

SEQ ID NO: 1637 - RNA, 19 nt, Artificial Sequence
  synthetic
aguauucauccacacccau

SEQ ID NO: 1638 - RNA, 19 nt, Artificial Sequence
  synthetic
gaguauucauccacaccca

SEQ ID NO: 1639 - RNA, 19 nt, Artificial Sequence
  synthetic
ggaguauucauccacaccc

SEQ ID NO: 1640 - RNA, 19 nt, Artificial Sequence
  synthetic
uggaguauucauccacacc

SEQ ID NO: 1641 - RNA, 19 nt, Artificial Sequence
  synthetic
cuggaguauucauccacac

SEQ ID NO: 1642 - RNA, 19 nt, Artificial Sequence
  synthetic
acuggaguauucauccaca

SEQ ID NO: 1643 - RNA, 19 nt, Artificial Sequence
  synthetic
uacuggaguauucauccac

SEQ ID NO: 1644 - RNA, 19 nt, Artificial Sequence
  synthetic
guacuggaguauucaucca

SEQ ID NO: 1645 - RNA, 19 nt, Artificial Sequence
  synthetic
uguacuggaguauucaucc

SEQ ID NO: 1646 - RNA, 19 nt, Artificial Sequence
  synthetic
cuguacuggaguauucauc

SEQ ID NO: 1647 - RNA, 19 nt, Artificial Sequence
  synthetic
ucuguacuggaguauucau

SEQ ID NO: 1648 - RNA, 19 nt, Artificial Sequence
  synthetic
cucuguacuggaguauuca

SEQ ID NO: 1649 - RNA, 19 nt, Artificial Sequence
  synthetic
ucucuguacuggaguauuc

SEQ ID NO: 1650 - RNA, 19 nt, Artificial Sequence
  synthetic
cucucuguacuggaguauu

SEQ ID NO: 1651 - RNA, 19 nt, Artificial Sequence
  synthetic
uaaccaccacccucucugu

SEQ ID NO: 1652 - RNA, 19 nt, Artificial Sequence
  synthetic
ucaaaaaccgaucaaugcu

SEQ ID NO: 1653 - RNA, 19 nt, Artificial Sequence
  synthetic
ggucucgaacucucaaaaa

SEQ ID NO: 1654 - RNA, 19 nt, Artificial Sequence
  synthetic
uggucucgaacucucaaaa

SEQ ID NO: 1655 - RNA, 19 nt, Artificial Sequence
  synthetic
uuggucucgaacucucaaa

SEQ ID NO: 1656 - RNA, 19 nt, Artificial Sequence
  synthetic
cacguuggucucgaacucu

SEQ ID NO: 1657 - RNA, 19 nt, Artificial Sequence
  synthetic
gagauaauaauacauuccc

SEQ ID NO: 1658 - RNA, 19 nt, Artificial Sequence
  synthetic
cugaccuccucaggagaua

SEQ ID NO: 1659 - RNA, 19 nt, Artificial Sequence
  synthetic
acugaccuccucaggagau

SEQ ID NO: 1660 - RNA, 19 nt, Artificial Sequence
  synthetic
cacugaccuccucaggaga

SEQ ID NO: 1661 - RNA, 19 nt, Artificial Sequence
  synthetic
ucacugaccuccucaggag

SEQ ID NO: 1662 - RNA, 19 nt, Artificial Sequence
  synthetic
uucacugaccuccucagga

SEQ ID NO: 1663 - RNA, 19 nt, Artificial Sequence
  synthetic
uuucacugaccuccucagg

SEQ ID NO: 1664 - RNA, 19 nt, Artificial Sequence
  synthetic
guuucacugaccuccucag

SEQ ID NO: 1665 - RNA, 19 nt, Artificial Sequence
  synthetic
uguuucacugaccuccuca

SEQ ID NO: 1666 - RNA, 19 nt, Artificial Sequence
  synthetic
guguuucacugaccuccuc

SEQ ID NO: 1667 - RNA, 19 nt, Artificial Sequence
  synthetic
uguguuucacugaccuccu

SEQ ID NO: 1668 - RNA, 19 nt, Artificial Sequence
  synthetic
cuguguuucacugaccucc

SEQ ID NO: 1669 - RNA, 19 nt, Artificial Sequence
  synthetic
ccuguguuucacugaccuc

SEQ ID NO: 1670 - RNA, 19 nt, Artificial Sequence
  synthetic
cccuguguuucacugaccu

SEQ ID NO: 1671 - RNA, 19 nt, Artificial Sequence
  synthetic
ucccuguguuucacugacc

SEQ ID NO: 1672 - RNA, 19 nt, Artificial Sequence
  synthetic
uucccuguguuucacugac

SEQ ID NO: 1673 - RNA, 19 nt, Artificial Sequence
  synthetic
guucccuguguuucacuga

SEQ ID NO: 1674 - RNA, 19 nt, Artificial Sequence
  synthetic
gucucucuguucccugugu

SEQ ID NO: 1675 - RNA, 19 nt, Artificial Sequence
  synthetic
aaguuauugucagucucuc

SEQ ID NO: 1676 - RNA, 19 nt, Artificial Sequence
  synthetic
uaaguuauugucagucucu

SEQ ID NO: 1677 - RNA, 19 nt, Artificial Sequence
  synthetic
augaguaaguuauugucag

SEQ ID NO: 1678 - RNA, 19 nt, Artificial Sequence
  synthetic
ucucccacaucauugacga

SEQ ID NO: 1679 - RNA, 19 nt, Artificial Sequence
  synthetic
ccgacucaggaccguuaau

SEQ ID NO: 1680 - RNA, 19 nt, Artificial Sequence
  synthetic
ccaaaaccgacucaggacc

SEQ ID NO: 1681 - RNA, 19 nt, Artificial Sequence
  synthetic
accaaaaccgacucaggac

SEQ ID NO: 1682 - RNA, 19 nt, Artificial Sequence
  synthetic
gaccaaaaccgacucagga

SEQ ID NO: 1683 - RNA, 19 nt, Artificial Sequence
  synthetic
ugaccaaaaccgacucagg

SEQ ID NO: 1684 - RNA, 19 nt, Artificial Sequence
  synthetic
uugaccaaaaccgacucag

SEQ ID NO: 1685 - RNA, 19 nt, Artificial Sequence
  synthetic
auugaccaaaaccgacuca

SEQ ID NO: 1686 - RNA, 19 nt, Artificial Sequence
  synthetic
uauugaccaaaaccgacuc

SEQ ID NO: 1687 - RNA, 19 nt, Artificial Sequence
  synthetic
guauugaccaaaaccgacu

SEQ ID NO: 1688 - RNA, 19 nt, Artificial Sequence
  synthetic
agguauugaccaaaaccga

SEQ ID NO: 1689 - RNA, 19 nt, Artificial Sequence
  synthetic
uagguauugaccaaaaccg

SEQ ID NO: 1690 - RNA, 19 nt, Artificial Sequence
  synthetic
gauagguauugaccaaaac

SEQ ID NO: 1691 - RNA, 19 nt, Artificial Sequence
  synthetic
auugauagguauugaccaa

SEQ ID NO: 1692 - RNA, 19 nt, Artificial Sequence
  synthetic
cauugauagguauugacca

SEQ ID NO: 1693 - RNA, 19 nt, Artificial Sequence
  synthetic
ccauugauagguauugacc

SEQ ID NO: 1694 - RNA, 19 nt, Artificial Sequence
  synthetic
uccauugauagguauugac

SEQ ID NO: 1695 - RNA, 19 nt, Artificial Sequence
  synthetic
auccauugauagguauuga

SEQ ID NO: 1696 - RNA, 19 nt, Artificial Sequence
  synthetic
ugauccauugauagguauu

SEQ ID NO: 1697 - RNA, 19 nt, Artificial Sequence
  synthetic
augauccauugauagguau

SEQ ID NO: 1698 - RNA, 19 nt, Artificial Sequence
  synthetic
gaugauccauugauaggua

SEQ ID NO: 1699 - RNA, 19 nt, Artificial Sequence
  synthetic
ugaugauccauugauaggu

SEQ ID NO: 1700 - RNA, 19 nt, Artificial Sequence
  synthetic
cugaugauccauugauagg

SEQ ID NO: 1701 - RNA, 19 nt, Artificial Sequence
  synthetic
uucugaugauccauugaua

SEQ ID NO: 1702 - RNA, 19 nt, Artificial Sequence
  synthetic
uuucugaugauccauugau

SEQ ID NO: 1703 - RNA, 19 nt, Artificial Sequence
  synthetic
auuucugaugauccauuga

SEQ ID NO: 1704 - RNA, 19 nt, Artificial Sequence
  synthetic
aauuucugaugauccauug

SEQ ID NO: 1705 - RNA, 19 nt, Artificial Sequence
  synthetic
caauuucugaugauccauu

SEQ ID NO: 1706 - RNA, 19 nt, Artificial Sequence
  synthetic
ccaauuucugaugauccau

SEQ ID NO: 1707 - RNA, 19 nt, Artificial Sequence
  synthetic
cccaauuucugaugaucca

SEQ ID NO: 1708 - RNA, 19 nt, Artificial Sequence
  synthetic
ucccaauuucugaugaucc

SEQ ID NO: 1709 - RNA, 19 nt, Artificial Sequence
  synthetic
uucccaauuucugaugauc

SEQ ID NO: 1710 - RNA, 19 nt, Artificial Sequence
  synthetic
cuucccaauuucugaugau

SEQ ID NO: 1711 - RNA, 19 nt, Artificial Sequence
  synthetic
gcuucccaauuucugauga

SEQ ID NO: 1712 - RNA, 19 nt, Artificial Sequence
  synthetic
agcuucccaauuucugaug

SEQ ID NO: 1713 - RNA, 19 nt, Artificial Sequence
  synthetic
cagcuucccaauuucugau

SEQ ID NO: 1714 - RNA, 19 nt, Artificial Sequence
  synthetic
acagcuucccaauuucuga

SEQ ID NO: 1715 - RNA, 19 nt, Artificial Sequence
  synthetic
gacagcuucccaauuucug

SEQ ID NO: 1716 - RNA, 19 nt, Artificial Sequence
  synthetic
ugacagcuucccaauuucu

SEQ ID NO: 1717 - RNA, 19 nt, Artificial Sequence
  synthetic
uugacagcuucccaauuuc

SEQ ID NO: 1718 - RNA, 19 nt, Artificial Sequence
  synthetic
uuugacagcuucccaauuu

SEQ ID NO: 1719 - RNA, 19 nt, Artificial Sequence
  synthetic
uuuugacagcuucccaauu

SEQ ID NO: 1720 - RNA, 19 nt, Artificial Sequence
  synthetic
auuuugacagcuucccaau

SEQ ID NO: 1721 - RNA, 19 nt, Artificial Sequence
  synthetic
aauuuugacagcuucccaa

SEQ ID NO: 1722 - RNA, 19 nt, Artificial Sequence
  synthetic
gaauuuugacagcuuccca

SEQ ID NO: 1723 - RNA, 19 nt, Artificial Sequence
  synthetic
ugaauuuugacagcuuccc

SEQ ID NO: 1724 - RNA, 19 nt, Artificial Sequence
  synthetic
uugaauuuugacagcuucc

SEQ ID NO: 1725 - RNA, 19 nt, Artificial Sequence
  synthetic
auugaauuuugacagcuuc

SEQ ID NO: 1726 - RNA, 19 nt, Artificial Sequence
  synthetic
cauugaauuuugacagcuu

SEQ ID NO: 1727 - RNA, 19 nt, Artificial Sequence
  synthetic
ccauugaauuuugacagcu

SEQ ID NO: 1728 - RNA, 19 nt, Artificial Sequence
  synthetic
accauugaauuuugacagc

SEQ ID NO: 1729 - RNA, 19 nt, Artificial Sequence
  synthetic
gaccauugaauuuugacag

SEQ ID NO: 1730 - RNA, 19 nt, Artificial Sequence
  synthetic
agaccauugaauuuugaca

SEQ ID NO: 1731 - RNA, 19 nt, Artificial Sequence
  synthetic
gagaccauugaauuuugac

SEQ ID NO: 1732 - RNA, 19 nt, Artificial Sequence
  synthetic
ugagaccauugaauuuuga

SEQ ID NO: 1733 - RNA, 19 nt, Artificial Sequence
  synthetic
cugagaccauugaauuuug

SEQ ID NO: 1734 - RNA, 19 nt, Artificial Sequence
  synthetic
ucugagaccauugaauuuu

SEQ ID NO: 1735 - RNA, 19 nt, Artificial Sequence
  synthetic
uucugagaccauugaauuu

SEQ ID NO: 1736 - RNA, 19 nt, Artificial Sequence
  synthetic
auucugagaccauugaauu

SEQ ID NO: 1737 - RNA, 19 nt, Artificial Sequence
  synthetic
gauucugagaccauugaau

SEQ ID NO: 1738 - RNA, 19 nt, Artificial Sequence
  synthetic
ggauucugagaccauugaa

SEQ ID NO: 1739 - RNA, 19 nt, Artificial Sequence
  synthetic
aggauucugagaccauuga

SEQ ID NO: 1740 - RNA, 19 nt, Artificial Sequence
  synthetic
caggauucugagaccauug

SEQ ID NO: 1741 - RNA, 19 nt, Artificial Sequence
  synthetic
uuuuguuguacaacauugc

SEQ ID NO: 1742 - RNA, 19 nt, Artificial Sequence
  synthetic
auuuuguuguacaacauug

SEQ ID NO: 1743 - RNA, 19 nt, Artificial Sequence
  synthetic
cauuuuguuguacaacauu

SEQ ID NO: 1744 - RNA, 19 nt, Artificial Sequence
  synthetic
ccauuuuguuguacaacau

SEQ ID NO: 1745 - RNA, 19 nt, Artificial Sequence
  synthetic
uccauuuuguuguacaaca

SEQ ID NO: 1746 - RNA, 19 nt, Artificial Sequence
  synthetic
uuccauuuuguuguacaac

SEQ ID NO: 1747 - RNA, 19 nt, Artificial Sequence
  synthetic
auuccauuuuguuguacaa

SEQ ID NO: 1748 - RNA, 19 nt, Artificial Sequence
  synthetic
aauuccauuuuguuguaca

SEQ ID NO: 1749 - RNA, 19 nt, Artificial Sequence
  synthetic
aaauuccauuuuguuguac

SEQ ID NO: 1750 - RNA, 19 nt, Artificial Sequence
  synthetic
caaauuccauuuuguugua

SEQ ID NO: 1751 - RNA, 19 nt, Artificial Sequence
  synthetic
ucaaauuccauuuuguugu

SEQ ID NO: 1752 - RNA, 19 nt, Artificial Sequence
  synthetic
uucaaauuccauuuuguug

SEQ ID NO: 1753 - RNA, 19 nt, Artificial Sequence
  synthetic
guucaaauuccauuuuguu

SEQ ID NO: 1754 - RNA, 19 nt, Artificial Sequence
  synthetic
gguucaaauuccauuuugu

SEQ ID NO: 1755 - RNA, 19 nt, Artificial Sequence
  synthetic
ugguucaaauuccauuuug

SEQ ID NO: 1756 - RNA, 19 nt, Artificial Sequence
  synthetic
augguucaaauuccauuuu

SEQ ID NO: 1757 - RNA, 19 nt, Artificial Sequence
  synthetic
aaugguucaaauuccauuu

SEQ ID NO: 1758 - RNA, 19 nt, Artificial Sequence
  synthetic
aaaugguucaaauuccauu

SEQ ID NO: 1759 - RNA, 19 nt, Artificial Sequence
  synthetic
gaaaugguucaaauuccau

SEQ ID NO: 1760 - RNA, 19 nt, Artificial Sequence
  synthetic
ugaaaugguucaaauucca

SEQ ID NO: 1761 - RNA, 19 nt, Artificial Sequence
  synthetic
uugaaaugguucaaauucc

SEQ ID NO: 1762 - RNA, 19 nt, Artificial Sequence
  synthetic
auugaaaugguucaaauuc

SEQ ID NO: 1763 - RNA, 19 nt, Artificial Sequence
  synthetic
gauugaaaugguucaaauu

SEQ ID NO: 1764 - RNA, 19 nt, Artificial Sequence
  synthetic
agauugaaaugguucaaau

SEQ ID NO: 1765 - RNA, 19 nt, Artificial Sequence
  synthetic
aagauugaaaugguucaaa

SEQ ID NO: 1766 - RNA, 19 nt, Artificial Sequence
  synthetic
aaagauugaaaugguucaa

SEQ ID NO: 1767 - RNA, 19 nt, Artificial Sequence
  synthetic
uaaagauugaaaugguuca

SEQ ID NO: 1768 - RNA, 19 nt, Artificial Sequence
  synthetic
cuaaagauugaaaugguuc

SEQ ID NO: 1769 - RNA, 19 nt, Artificial Sequence
  synthetic
acuaaagauugaaaugguu

SEQ ID NO: 1770 - RNA, 19 nt, Artificial Sequence
  synthetic
ccuuaggaacuaaagauug

SEQ ID NO: 1771 - RNA, 19 nt, Artificial Sequence
  synthetic
uguauuggccucuaauggc

SEQ ID NO: 1772 - RNA, 19 nt, Artificial Sequence
  synthetic
acaaacccacuguauuggc

SEQ ID NO: 1773 - RNA, 19 nt, Artificial Sequence
  synthetic
gacaaacccacuguauugg

SEQ ID NO: 1774 - RNA, 19 nt, Artificial Sequence
  synthetic
ugacaaacccacuguauug

SEQ ID NO: 1775 - RNA, 19 nt, Artificial Sequence
  synthetic
cugacaaacccacuguauu

SEQ ID NO: 1776 - RNA, 19 nt, Artificial Sequence
  synthetic
ucugacaaacccacuguau

SEQ ID NO: 1777 - RNA, 19 nt, Artificial Sequence
  synthetic
uucugacaaacccacugua

SEQ ID NO: 1778 - RNA, 19 nt, Artificial Sequence
  synthetic
guucugacaaacccacugu

SEQ ID NO: 1779 - RNA, 19 nt, Artificial Sequence
  synthetic
aguucugacaaacccacug

SEQ ID NO: 1780 - RNA, 19 nt, Artificial Sequence
  synthetic
gaguucugacaaacccacu

SEQ ID NO: 1781 - RNA, 19 nt, Artificial Sequence
  synthetic
cucucauuuguuggaauag

SEQ ID NO: 1782 - RNA, 19 nt, Artificial Sequence
  synthetic
caaaugucccaaguacauc

SEQ ID NO: 1783 - RNA, 19 nt, Artificial Sequence
  synthetic
uuauuaucugggugguauc

SEQ ID NO: 1784 - RNA, 19 nt, Artificial Sequence
  synthetic
gcuuuauuaucuggguggu

SEQ ID NO: 1785 - RNA, 19 nt, Artificial Sequence
  synthetic
agcuuuauuaucugggugg

SEQ ID NO: 1786 - RNA, 19 nt, Artificial Sequence
  synthetic
aagcuuuauuaucugggug

SEQ ID NO: 1787 - RNA, 19 nt, Artificial Sequence
  synthetic
gaagcuuuauuaucugggu

SEQ ID NO: 1788 - RNA, 19 nt, Artificial Sequence
  synthetic
agaagcuuuauuaucuggg

SEQ ID NO: 1789 - RNA, 19 nt, Artificial Sequence
  synthetic
gagaagcuuuauuaucugg

SEQ ID NO: 1790 - RNA, 19 nt, Artificial Sequence
  synthetic
ggagaagcuuuauuaucug

SEQ ID NO: 1791 - RNA, 19 nt, Artificial Sequence
  synthetic
gggagaagcuuuauuaucu

SEQ ID NO: 1792 - RNA, 19 nt, Artificial Sequence
  synthetic
agggagaagcuuuauuauc

SEQ ID NO: 1793 - RNA, 19 nt, Artificial Sequence
  synthetic
aagggagaagcuuuauuau

SEQ ID NO: 1794 - RNA, 19 nt, Artificial Sequence
  synthetic
aaagggagaagcuuuauua

SEQ ID NO: 1795 - RNA, 19 nt, Artificial Sequence
  synthetic
aaaagggagaagcuuuauu

SEQ ID NO: 1796 - RNA, 19 nt, Artificial Sequence
  synthetic
caaaagggagaagcuuuau

SEQ ID NO: 1797 - RNA, 19 nt, Artificial Sequence
  synthetic
gcaaaagggagaagcuuua

SEQ ID NO: 1798 - RNA, 19 nt, Artificial Sequence
  synthetic
ugcaaaagggagaagcuuu

SEQ ID NO: 1799 - RNA, 19 nt, Artificial Sequence
  synthetic
cugcaaaagggagaagcuu

SEQ ID NO: 1800 - RNA, 19 nt, Artificial Sequence
  synthetic
gcugcaaaagggagaagcu

SEQ ID NO: 1801 - RNA, 19 nt, Artificial Sequence
  synthetic
ggcugcaaaagggagaagc

SEQ ID NO: 1802 - RNA, 19 nt, Artificial Sequence
  synthetic
cggcugcaaaagggagaag

SEQ ID NO: 1803 - RNA, 19 nt, Artificial Sequence
  synthetic
gcggcugcaaaagggagaa

SEQ ID NO: 1804 - RNA, 19 nt, Artificial Sequence
  synthetic
agcggcugcaaaagggaga

SEQ ID NO: 1805 - RNA, 19 nt, Artificial Sequence
  synthetic
gagcggcugcaaaagggag

SEQ ID NO: 1806 - RNA, 19 nt, Artificial Sequence
  synthetic
ggagcggcugcaaaaggga

SEQ ID NO: 1807 - RNA, 19 nt, Artificial Sequence
  synthetic
uggagcggcugcaaaaggg

SEQ ID NO: 1808 - RNA, 19 nt, Artificial Sequence
  synthetic
guggagcggcugcaaaagg

SEQ ID NO: 1809 - RNA, 19 nt, Artificial Sequence
  synthetic
gguggagcggcugcaaaag

SEQ ID NO: 1810 - RNA, 19 nt, Artificial Sequence
  synthetic
ugguggagcggcugcaaaa

SEQ ID NO: 1811 - RNA, 19 nt, Artificial Sequence
  synthetic
uugguggagcggcugcaaa

SEQ ID NO: 1812 - RNA, 19 nt, Artificial Sequence
  synthetic
uuugguggagcggcugcaa

SEQ ID NO: 1813 - RNA, 19 nt, Artificial Sequence
  synthetic
cuuugguggagcggcugca

SEQ ID NO: 1814 - RNA, 19 nt, Artificial Sequence
  synthetic
gcuuugguggagcggcugc

SEQ ID NO: 1815 - RNA, 19 nt, Artificial Sequence
  synthetic
ugcuuugguggagcggcug

SEQ ID NO: 1816 - RNA, 19 nt, Artificial Sequence
  synthetic
uugcuuugguggagcggcu

SEQ ID NO: 1817 - RNA, 19 nt, Artificial Sequence
  synthetic
uuugcuuugguggagcggc

SEQ ID NO: 1818 - RNA, 19 nt, Artificial Sequence
  synthetic
cuuugcuuugguggagcgg

SEQ ID NO: 1819 - RNA, 19 nt, Artificial Sequence
  synthetic
gcuuugcuuugguggagcg

SEQ ID NO: 1820 - RNA, 19 nt, Artificial Sequence
  synthetic
ugcuuugcuuugguggagc

SEQ ID NO: 1821 - RNA, 19 nt, Artificial Sequence
  synthetic
cugcuuugcuuugguggag

SEQ ID NO: 1822 - RNA, 19 nt, Artificial Sequence
  synthetic
agaacugcauucugcuuug

SEQ ID NO: 1823 - RNA, 19 nt, Artificial Sequence
  synthetic
gagaacugcauucugcuuu

SEQ ID NO: 1824 - RNA, 19 nt, Artificial Sequence
  synthetic
agagaacugcauucugcuu

SEQ ID NO: 1825 - RNA, 19 nt, Artificial Sequence
  synthetic
aagagaacugcauucugcu

SEQ ID NO: 1826 - RNA, 19 nt, Artificial Sequence
  synthetic
gaagagaacugcauucugc

SEQ ID NO: 1827 - RNA, 19 nt, Artificial Sequence
  synthetic
ugaagagaacugcauucug

SEQ ID NO: 1828 - RNA, 19 nt, Artificial Sequence
  synthetic
ucacauuuacagucaauga

SEQ ID NO: 1829 - RNA, 19 nt, Artificial Sequence
  synthetic
ccccucacauuuacaguca

SEQ ID NO: 1830 - RNA, 19 nt, Artificial Sequence
  synthetic
uccccucacauuuacaguc

SEQ ID NO: 1831 - RNA, 19 nt, Artificial Sequence
  synthetic
auccccucacauuuacagu

SEQ ID NO: 1832 - RNA, 19 nt, Artificial Sequence
  synthetic
gauccccucacauuuacag

SEQ ID NO: 1833 - RNA, 19 nt, Artificial Sequence
  synthetic
ugauccccucacauuuaca

SEQ ID NO: 1834 - RNA, 19 nt, Artificial Sequence
  synthetic
cugauccccucacauuuac

SEQ ID NO: 1835 - RNA, 19 nt, Artificial Sequence
  synthetic
ccugauccccucacauuua

SEQ ID NO: 1836 - RNA, 19 nt, Artificial Sequence
  synthetic
cccugauccccucacauuu

SEQ ID NO: 1837 - RNA, 19 nt, Artificial Sequence
  synthetic
ucccugauccccucacauu

SEQ ID NO: 1838 - RNA, 19 nt, Artificial Sequence
  synthetic
aucccugauccccucacau

SEQ ID NO: 1839 - RNA, 19 nt, Artificial Sequence
  synthetic
caucccugauccccucaca

SEQ ID NO: 1840 - RNA, 19 nt, Artificial Sequence
  synthetic
ucaucccugauccccucac

SEQ ID NO: 1841 - RNA, 19 nt, Artificial Sequence
  synthetic
cucaucccugauccccuca

SEQ ID NO: 1842 - RNA, 19 nt, Artificial Sequence
  synthetic
ucucaucccugauccccuc

SEQ ID NO: 1843 - RNA, 19 nt, Artificial Sequence
  synthetic
uucucaucccugauccccu

SEQ ID NO: 1844 - RNA, 19 nt, Artificial Sequence
  synthetic
auucucaucccugaucccc

SEQ ID NO: 1845 - RNA, 19 nt, Artificial Sequence
  synthetic
uauucucaucccugauccc

SEQ ID NO: 1846 - RNA, 19 nt, Artificial Sequence
  synthetic
guauucucaucccugaucc

SEQ ID NO: 1847 - RNA, 19 nt, Artificial Sequence
  synthetic
aguauucucaucccugauc

SEQ ID NO: 1848 - RNA, 19 nt, Artificial Sequence
  synthetic
aaguauucucaucccugau

SEQ ID NO: 1849 - RNA, 19 nt, Artificial Sequence
  synthetic
caaguauucucaucccuga

SEQ ID NO: 1850 - RNA, 19 nt, Artificial Sequence
  synthetic
acaaguauucucaucccug

SEQ ID NO: 1851 - RNA, 19 nt, Artificial Sequence
  synthetic
uacaaguauucucaucccu

SEQ ID NO: 1852 - RNA, 19 nt, Artificial Sequence
  synthetic
uuacaaguauucucauccc

SEQ ID NO: 1853 - RNA, 19 nt, Artificial Sequence
  synthetic
cuuacaaguauucucaucc

SEQ ID NO: 1854 - RNA, 19 nt, Artificial Sequence
  synthetic
ccuuacaaguauucucauc

SEQ ID NO: 1855 - RNA, 19 nt, Artificial Sequence
  synthetic
cccuuacaaguauucucau

SEQ ID NO: 1856 - RNA, 19 nt, Artificial Sequence
  synthetic
ccccuuacaaguauucuca

SEQ ID NO: 1857 - RNA, 19 nt, Artificial Sequence
  synthetic
gccccuuacaaguauucuc

SEQ ID NO: 1858 - RNA, 19 nt, Artificial Sequence
  synthetic
ugccccuuacaaguauucu

SEQ ID NO: 1859 - RNA, 19 nt, Artificial Sequence
  synthetic
uugccccuuacaaguauuc

SEQ ID NO: 1860 - RNA, 19 nt, Artificial Sequence
  synthetic
auugccccuuacaaguauu

SEQ ID NO: 1861 - RNA, 19 nt, Artificial Sequence
  synthetic
aauugccccuuacaaguau

SEQ ID NO: 1862 - RNA, 19 nt, Artificial Sequence
  synthetic
gaauugccccuuacaagua

SEQ ID NO: 1863 - RNA, 19 nt, Artificial Sequence
  synthetic
agaauugccccuuacaagu

SEQ ID NO: 1864 - RNA, 19 nt, Artificial Sequence
  synthetic
gagaauugccccuuacaag

SEQ ID NO: 1865 - RNA, 19 nt, Artificial Sequence
  synthetic
ggagaauugccccuuacaa

SEQ ID NO: 1866 - RNA, 19 nt, Artificial Sequence
  synthetic
aggagaauugccccuuaca

SEQ ID NO: 1867 - RNA, 19 nt, Artificial Sequence
  synthetic
caggagaauugccccuuac

SEQ ID NO: 1868 - RNA, 19 nt, Artificial Sequence
  synthetic
acaggagaauugccccuua

SEQ ID NO: 1869 - RNA, 19 nt, Artificial Sequence
  synthetic
uacaggagaauugccccuu

SEQ ID NO: 1870 - RNA, 19 nt, Artificial Sequence
  synthetic
auacaggagaauugccccu

SEQ ID NO: 1871 - RNA, 19 nt, Artificial Sequence
  synthetic
aauacaggagaauugcccc

SEQ ID NO: 1872 - RNA, 19 nt, Artificial Sequence
  synthetic
gaauacaggagaauugccc

SEQ ID NO: 1873 - RNA, 19 nt, Artificial Sequence
  synthetic
ugaauacaggagaauugcc

SEQ ID NO: 1874 - RNA, 19 nt, Artificial Sequence
  synthetic
uugaauacaggagaauugc

SEQ ID NO: 1875 - RNA, 19 nt, Artificial Sequence
  synthetic
guugaauacaggagaauug

SEQ ID NO: 1876 - RNA, 19 nt, Artificial Sequence
  synthetic
aguugaauacaggagaauu

SEQ ID NO: 1877 - RNA, 19 nt, Artificial Sequence
  synthetic
uaguugaauacaggagaau

SEQ ID NO: 1878 - RNA, 19 nt, Artificial Sequence
  synthetic
guaguugaauacaggagaa

SEQ ID NO: 1879 - RNA, 19 nt, Artificial Sequence
  synthetic
uguaguugaauacaggaga

SEQ ID NO: 1880 - RNA, 19 nt, Artificial Sequence
  synthetic
uuguaguugaauacaggag

SEQ ID NO: 1881 - RNA, 19 nt, Artificial Sequence
  synthetic
guuguaguugaauacagga

SEQ ID NO: 1882 - RNA, 19 nt, Artificial Sequence
  synthetic
uguuguaguugaauacagg

SEQ ID NO: 1883 - RNA, 19 nt, Artificial Sequence
  synthetic
uuguuguaguugaauacag

SEQ ID NO: 1884 - RNA, 19 nt, Artificial Sequence
  synthetic
cuuguuguaguugaauaca

SEQ ID NO: 1885 - RNA, 19 nt, Artificial Sequence
  synthetic
ucuuguuguaguugaauac

SEQ ID NO: 1886 - RNA, 19 nt, Artificial Sequence
  synthetic
gucuuguuguaguugaaua

SEQ ID NO: 1887 - RNA, 19 nt, Artificial Sequence
  synthetic
ggucuuguuguaguugaau

SEQ ID NO: 1888 - RNA, 19 nt, Artificial Sequence
  synthetic
uggucuuguuguaguugaa

SEQ ID NO: 1889 - RNA, 19 nt, Artificial Sequence
  synthetic
guggucuuguuguaguuga

SEQ ID NO: 1890 - RNA, 19 nt, Artificial Sequence
  synthetic
aguggucuuguuguaguug

SEQ ID NO: 1891 - RNA, 19 nt, Artificial Sequence
  synthetic
uaguggucuuguuguaguu

SEQ ID NO: 1892 - RNA, 19 nt, Artificial Sequence
  synthetic
uuaguggucuuguuguagu

SEQ ID NO: 1893 - RNA, 19 nt, Artificial Sequence
  synthetic
uuuaguggucuuguuguag

SEQ ID NO: 1894 - RNA, 19 nt, Artificial Sequence
  synthetic
uuuuaguggucuuguugua

SEQ ID NO: 1895 - RNA, 19 nt, Artificial Sequence
  synthetic
cuuuuaguggucuuguugu

SEQ ID NO: 1896 - RNA, 19 nt, Artificial Sequence
  synthetic
ucuuuuaguggucuuguug

SEQ ID NO: 1897 - RNA, 19 nt, Artificial Sequence
  synthetic
gucuuuuaguggucuuguu

SEQ ID NO: 1898 - RNA, 19 nt, Artificial Sequence
  synthetic
agucuuuuaguggucuugu

SEQ ID NO: 1899 - RNA, 19 nt, Artificial Sequence
  synthetic
uagucuuuuaguggucuug

SEQ ID NO: 1900 - RNA, 19 nt, Artificial Sequence
  synthetic
uuagucuuuuaguggucuu

SEQ ID NO: 1901 - RNA, 19 nt, Artificial Sequence
  synthetic
guuagucuuuuaguggucu

SEQ ID NO: 1902 - RNA, 19 nt, Artificial Sequence
  synthetic
uguuagucuuuuagugguc

SEQ ID NO: 1903 - RNA, 19 nt, Artificial Sequence
  synthetic
cuuuuccgagaauuguuag

SEQ ID NO: 1904 - RNA, 19 nt, Artificial Sequence
  synthetic
ccggcaucuuuuccgagaa

SEQ ID NO: 1905 - RNA, 19 nt, Artificial Sequence
  synthetic
gccggcaucuuuuccgaga

SEQ ID NO: 1906 - RNA, 19 nt, Artificial Sequence
  synthetic
ugccggcaucuuuuccgag

SEQ ID NO: 1907 - RNA, 19 nt, Artificial Sequence
  synthetic
gugccggcaucuuuuccga

SEQ ID NO: 1908 - RNA, 19 nt, Artificial Sequence
  synthetic
agugccggcaucuuuuccg

SEQ ID NO: 1909 - RNA, 19 nt, Artificial Sequence
  synthetic
aagugccggcaucuuuucc

SEQ ID NO: 1910 - RNA, 19 nt, Artificial Sequence
  synthetic
aaagugccggcaucuuuuc

SEQ ID NO: 1911 - RNA, 19 nt, Artificial Sequence
  synthetic
uaaagugccggcaucuuuu

SEQ ID NO: 1912 - RNA, 19 nt, Artificial Sequence
  synthetic
uuaaagugccggcaucuuu

SEQ ID NO: 1913 - RNA, 19 nt, Artificial Sequence
  synthetic
auuaaagugccggcaucuu

SEQ ID NO: 1914 - RNA, 19 nt, Artificial Sequence
  synthetic
aauuaaagugccggcaucu

SEQ ID NO: 1915 - RNA, 19 nt, Artificial Sequence
  synthetic
caauuaaagugccggcauc

SEQ ID NO: 1916 - RNA, 19 nt, Artificial Sequence
  synthetic
ucaauuaaagugccggcau

SEQ ID NO: 1917 - RNA, 19 nt, Artificial Sequence
  synthetic
uucaauuaaagugccggca

SEQ ID NO: 1918 - RNA, 19 nt, Artificial Sequence
  synthetic
cuucaauuaaagugccggc

SEQ ID NO: 1919 - RNA, 19 nt, Artificial Sequence
  synthetic
ucuucaauuaaagugccgg

SEQ ID NO: 1920 - RNA, 19 nt, Artificial Sequence
  synthetic
gucuucaauuaaagugccg

SEQ ID NO: 1921 - RNA, 19 nt, Artificial Sequence
  synthetic
ggucuucaauuaaagugcc

SEQ ID NO: 1922 - RNA, 19 nt, Artificial Sequence
  synthetic
gggucuucaauuaaagugc

SEQ ID NO: 1923 - RNA, 19 nt, Artificial Sequence
  synthetic
ugggucuucaauuaaagug

SEQ ID NO: 1924 - RNA, 19 nt, Artificial Sequence
  synthetic
cugggucuucaauuaaagu

SEQ ID NO: 1925 - RNA, 19 nt, Artificial Sequence
  synthetic
ucugggucuucaauuaaag

SEQ ID NO: 1926 - RNA, 19 nt, Artificial Sequence
  synthetic
aucugggucuucaauuaaa

SEQ ID NO: 1927 - RNA, 19 nt, Artificial Sequence
  synthetic
caucugggucuucaauuaa

SEQ ID NO: 1928 - RNA, 19 nt, Artificial Sequence
  synthetic
ucaucugggucuucaauua

SEQ ID NO: 1929 - RNA, 19 nt, Artificial Sequence
  synthetic
uuucaucugggucuucaau

SEQ ID NO: 1930 - RNA, 19 nt, Artificial Sequence
  synthetic
ugcuuucaucugggucuuc

SEQ ID NO: 1931 - RNA, 19 nt, Artificial Sequence
  synthetic
gacuccacuccggaugugc

SEQ ID NO: 1932 - RNA, 19 nt, Artificial Sequence
  synthetic
cggacuccacuccggaugu

SEQ ID NO: 1933 - RNA, 19 nt, Artificial Sequence
  synthetic
gaaauccucucaagacagc

SEQ ID NO: 1934 - RNA, 19 nt, Artificial Sequence
  synthetic
cuuccuuaccuauaaugag

SEQ ID NO: 1935 - RNA, 19 nt, Artificial Sequence
  synthetic
cguaucuucugucuuccuu

SEQ ID NO: 1936 - RNA, 19 nt, Artificial Sequence
  synthetic
ccguaucuucugucuuccu

SEQ ID NO: 1937 - RNA, 19 nt, Artificial Sequence
  synthetic
uccguaucuucugucuucc

SEQ ID NO: 1938 - RNA, 19 nt, Artificial Sequence
  synthetic
guccguaucuucugucuuc

SEQ ID NO: 1939 - RNA, 19 nt, Artificial Sequence
  synthetic
gguccguaucuucugucuu

SEQ ID NO: 1940 - RNA, 19 nt, Artificial Sequence
  synthetic
ugguccguaucuucugucu

SEQ ID NO: 1941 - RNA, 19 nt, Artificial Sequence
  synthetic
cugguccguaucuucuguc

SEQ ID NO: 1942 - RNA, 19 nt, Artificial Sequence
  synthetic
gcugguccguaucuucugu

SEQ ID NO: 1943 - RNA, 19 nt, Artificial Sequence
  synthetic
ugcugguccguaucuucug

SEQ ID NO: 1944 - RNA, 19 nt, Artificial Sequence
  synthetic
augcugguccguaucuucu

SEQ ID NO: 1945 - RNA, 19 nt, Artificial Sequence
  synthetic
aaugcugguccguaucuuc

SEQ ID NO: 1946 - RNA, 19 nt, Artificial Sequence
  synthetic
uaaugcugguccguaucuu

SEQ ID NO: 1947 - RNA, 19 nt, Artificial Sequence
  synthetic
uuaaugcugguccguaucu

SEQ ID NO: 1948 - RNA, 19 nt, Artificial Sequence
  synthetic
cuuaaugcugguccguauc

SEQ ID NO: 1949 - RNA, 19 nt, Artificial Sequence
  synthetic
guucauugaugcuuaaugc

SEQ ID NO: 1950 - RNA, 19 nt, Artificial Sequence
  synthetic
cuuuugcaagguuacucag

SEQ ID NO: 1951 - RNA, 19 nt, Artificial Sequence
  synthetic
uuuccccuuuugcaagguu

SEQ ID NO: 1952 - RNA, 19 nt, Artificial Sequence
  synthetic
uuuuccccuuuugcaaggu

SEQ ID NO: 1953 - RNA, 19 nt, Artificial Sequence
  synthetic
gcacauuagcuuuuucccc

SEQ ID NO: 1954 - RNA, 19 nt, Artificial Sequence
  synthetic
cgucuccuugcccaauuag

SEQ ID NO: 1955 - RNA, 19 nt, Artificial Sequence
  synthetic
guuucauuaccaacaccac

SEQ ID NO: 1956 - RNA, 19 nt, Artificial Sequence
  synthetic
cccguuuucguuucauuac

SEQ ID NO: 1957 - RNA, 19 nt, Artificial Sequence
  synthetic
ucccguuuucguuucauua

SEQ ID NO: 1958 - RNA, 19 nt, Artificial Sequence
  synthetic
gucccguuuucguuucauu

SEQ ID NO: 1959 - RNA, 19 nt, Artificial Sequence
  synthetic
agucccguuuucguuucau

SEQ ID NO: 1960 - RNA, 19 nt, Artificial Sequence
  synthetic
gagucccguuuucguuuca

SEQ ID NO: 1961 - RNA, 19 nt, Artificial Sequence
  synthetic
agagucccguuuucguuuc

SEQ ID NO: 1962 - RNA, 19 nt, Artificial Sequence
  synthetic
uagagucccguuuucguuu

SEQ ID NO: 1963 - RNA, 19 nt, Artificial Sequence
  synthetic
cuagagucccguuuucguu

SEQ ID NO: 1964 - RNA, 19 nt, Artificial Sequence
  synthetic
gcuagagucccguuuucgu

SEQ ID NO: 1965 - RNA, 19 nt, Artificial Sequence
  synthetic
ugcuagagucccguuuucg

SEQ ID NO: 1966 - RNA, 19 nt, Artificial Sequence
  synthetic
augcuagagucccguuuuc

SEQ ID NO: 1967 - RNA, 19 nt, Artificial Sequence
  synthetic
uaugcuagagucccguuuu

SEQ ID NO: 1968 - RNA, 19 nt, Artificial Sequence
  synthetic
guaugcuagagucccguuu

SEQ ID NO: 1969 - RNA, 19 nt, Artificial Sequence
  synthetic
aguaugcuagagucccguu

SEQ ID NO: 1970 - RNA, 19 nt, Artificial Sequence
  synthetic
aaguaugcuagagucccgu

SEQ ID NO: 1971 - RNA, 19 nt, Artificial Sequence
  synthetic
uaaguaugcuagagucccg

SEQ ID NO: 1972 - RNA, 19 nt, Artificial Sequence
  synthetic
guaaguaugcuagaguccc

SEQ ID NO: 1973 - RNA, 19 nt, Artificial Sequence
  synthetic
aguaaguaugcuagagucc

SEQ ID NO: 1974 - RNA, 19 nt, Artificial Sequence
  synthetic
caguaaguaugcuagaguc

SEQ ID NO: 1975 - RNA, 19 nt, Artificial Sequence
  synthetic
ucaguaaguaugcuagagu

SEQ ID NO: 1976 - RNA, 19 nt, Artificial Sequence
  synthetic
gucaguaaguaugcuagag

SEQ ID NO: 1977 - RNA, 19 nt, Artificial Sequence
  synthetic
ugucaguaaguaugcuaga

SEQ ID NO: 1978 - RNA, 19 nt, Artificial Sequence
  synthetic
cugucaguaaguaugcuag

SEQ ID NO: 1979 - RNA, 19 nt, Artificial Sequence
  synthetic
gcugucaguaaguaugcua

SEQ ID NO: 1980 - RNA, 19 nt, Artificial Sequence
  synthetic
ggcugucaguaaguaugcu

SEQ ID NO: 1981 - RNA, 19 nt, Artificial Sequence
  synthetic
uggcugucaguaaguaugc

SEQ ID NO: 1982 - RNA, 19 nt, Artificial Sequence
  synthetic
cuggcugucaguaaguaug

SEQ ID NO: 1983 - RNA, 19 nt, Artificial Sequence
  synthetic
ucuggcugucaguaaguau

SEQ ID NO: 1984 - RNA, 19 nt, Artificial Sequence
  synthetic
gucuggcugucaguaagua

SEQ ID NO: 1985 - RNA, 19 nt, Artificial Sequence
  synthetic
ugucuggcugucaguaagu

SEQ ID NO: 1986 - RNA, 19 nt, Artificial Sequence
  synthetic
cugucuggcugucaguaag

SEQ ID NO: 1987 - RNA, 19 nt, Artificial Sequence
  synthetic
gcugucuggcugucaguaa

SEQ ID NO: 1988 - RNA, 19 nt, Artificial Sequence
  synthetic
cgcugucuggcugucagua

SEQ ID NO: 1989 - RNA, 19 nt, Artificial Sequence
  synthetic
ucgcugucuggcugucagu

SEQ ID NO: 1990 - RNA, 19 nt, Artificial Sequence
  synthetic
gucgcugucuggcugucag

SEQ ID NO: 1991 - RNA, 19 nt, Artificial Sequence
  synthetic
ggucgcugucuggcuguca

SEQ ID NO: 1992 - RNA, 19 nt, Artificial Sequence
  synthetic
uggucgcugucuggcuguc

SEQ ID NO: 1993 - RNA, 19 nt, Artificial Sequence
  synthetic
uuggucgcugucuggcugu

SEQ ID NO: 1994 - RNA, 19 nt, Artificial Sequence
  synthetic
uuuggucgcugucuggcug

SEQ ID NO: 1995 - RNA, 19 nt, Artificial Sequence
  synthetic
uuuuggucgcugucuggcu

SEQ ID NO: 1996 - RNA, 19 nt, Artificial Sequence
  synthetic
cuuuuggucgcugucuggc

SEQ ID NO: 1997 - RNA, 19 nt, Artificial Sequence
  synthetic
ucuuuuggucgcugucugg

SEQ ID NO: 1998 - RNA, 19 nt, Artificial Sequence
  synthetic
uucuuuuggucgcugucug

SEQ ID NO: 1999 - RNA, 19 nt, Artificial Sequence
  synthetic
auucuuuuggucgcugucu

SEQ ID NO: 2000 - RNA, 19 nt, Artificial Sequence
  synthetic
aauucuuuuggucgcuguc

SEQ ID NO: 2001 - RNA, 19 nt, Artificial Sequence
  synthetic
gaauucuuuuggucgcugu

SEQ ID NO: 2002 - RNA, 19 nt, Artificial Sequence
  synthetic
cgaauucuuuuggucgcug

SEQ ID NO: 2003 - RNA, 19 nt, Artificial Sequence
  synthetic
ccgaauucuuuuggucgcu

SEQ ID NO: 2004 - RNA, 19 nt, Artificial Sequence
  synthetic
uccgaauucuuuuggucgc

SEQ ID NO: 2005 - RNA, 19 nt, Artificial Sequence
  synthetic
auccgaauucuuuuggucg

SEQ ID NO: 2006 - RNA, 19 nt, Artificial Sequence
  synthetic
cauccgaauucuuuugguc

SEQ ID NO: 2007 - RNA, 19 nt, Artificial Sequence
  synthetic
ccauccgaauucuuuuggu

SEQ ID NO: 2008 - RNA, 19 nt, Artificial Sequence
  synthetic
gccauccgaauucuuuugg

SEQ ID NO: 2009 - RNA, 19 nt, Artificial Sequence
  synthetic
ggccauccgaauucuuuug

SEQ ID NO: 2010 - RNA, 19 nt, Artificial Sequence
  synthetic
uggccauccgaauucuuuu

SEQ ID NO: 2011 - RNA, 19 nt, Artificial Sequence
  synthetic
auggccauccgaauucuuu

SEQ ID NO: 2012 - RNA, 19 nt, Artificial Sequence
  synthetic
gauggccauccgaauucuu

SEQ ID NO: 2013 - RNA, 19 nt, Artificial Sequence
  synthetic
ugauggccauccgaauucu

SEQ ID NO: 2014 - RNA, 19 nt, Artificial Sequence
  synthetic
uugauggccauccgaauuc

SEQ ID NO: 2015 - RNA, 19 nt, Artificial Sequence
  synthetic
auugauggccauccgaauu

SEQ ID NO: 2016 - RNA, 19 nt, Artificial Sequence
  synthetic
aauugauggccauccgaau

SEQ ID NO: 2017 - RNA, 19 nt, Artificial Sequence
  synthetic
uaauugauggccauccgaa

SEQ ID NO: 2018 - RNA, 19 nt, Artificial Sequence
  synthetic
uuaauugauggccauccga

SEQ ID NO: 2019 - RNA, 19 nt, Artificial Sequence
  synthetic
auuaauugauggccauccg

SEQ ID NO: 2020 - RNA, 19 nt, Artificial Sequence
  synthetic
guuuuuaaacuauucaaca

SEQ ID NO: 2021 - RNA, 19 nt, Artificial Sequence
  synthetic
aaagguuaaaacauggaac

SEQ ID NO: 2022 - RNA, 19 nt, Artificial Sequence
  synthetic
aaaacauggaaccuuuggc

SEQ ID NO: 2023 - RNA, 19 nt, Artificial Sequence
  synthetic
aucgagugaugguaucacc

SEQ ID NO: 2024 - RNA, 19 nt, Artificial Sequence
  synthetic
aaaacaagauuucucccag

SEQ ID NO: 2025 - RNA, 19 nt, Artificial Sequence
  synthetic
aaagaauaaaagaacuacg

SEQ ID NO: 2026 - RNA, 19 nt, Artificial Sequence
  synthetic
uugcaaaauuucucccuug

SEQ ID NO: 2027 - RNA, 19 nt, Artificial Sequence
  synthetic
aaaugagugaugcuggauc

SEQ ID NO: 2028 - RNA, 19 nt, Artificial Sequence
  synthetic
augaaauggaugauggcaa

SEQ ID NO: 2029 - RNA, 23 nt, Artificial Sequence
  synthetic
cuggcggaacaagcaguauauac

SEQ ID NO: 2030 - RNA, 23 nt, Artificial Sequence
  synthetic
uugcuggcggaacaagcaguaua

SEQ ID NO: 2031 - RNA, 23 nt, Artificial Sequence
  synthetic
uucggauggccaucaauuaaugu

SEQ ID NO: 2032 - RNA, 23 nt, Artificial Sequence
  synthetic
aacgggacucuagcauacuuacu

SEQ ID NO: 2033 - RNA, 23 nt, Artificial Sequence
  synthetic
accacccagauaauaaagcuucu

SEQ ID NO: 2034 - RNA, 23 nt, Artificial Sequence
  synthetic
cagggaugagaauacuuguaagg

SEQ ID NO: 2035 - RNA, 23 nt, Artificial Sequence
  synthetic
uucuccuguauucaacuacaaca

SEQ ID NO: 2036 - RNA, 23 nt, Artificial Sequence
  synthetic
acccgucacuuaggaugaaaugg

SEQ ID NO: 2037 - DNA, 21 bp, Artificial Sequence
  synthetic
  misc_feature (1)..(19): ribonucleotides
ggcggaacaagcaguauautt

SEQ ID NO: 2038 - DNA, 21 bp, Artificial Sequence
  synthetic
  misc_feature (1)..(19): ribonucleotides
gcuggcggaacaagcaguatt

SEQ ID NO: 2039 - DNA, 21 bp, Artificial Sequence
  synthetic
  misc_feature (1)..(19): ribonucleotides
cggauggccaucaauuaautt

SEQ ID NO: 2040 - DNA, 21 bp, Artificial Sequence
  synthetic
  misc_feature (1)..(19): ribonucleotides
cgggacucuagcauacuuatt

SEQ ID NO: 2041 - DNA, 21 bp, Artificial Sequence
  synthetic
  misc_feature (1)..(19): ribonucleotides
cacccagauaauaaagcuutt

SEQ ID NO: 2042 - DNA, 21 bp, Artificial Sequence
  synthetic
  misc_feature (1)..(19): ribonucleotides
gggaugagaauacuuguaatt

SEQ ID NO: 2043 - DNA, 21 bp, Artificial Sequence
  synthetic
  misc_feature (1)..(19): ribonucleotides
cuccuguauucaacuacaatt

SEQ ID NO: 2044 - DNA, 21 bp, Artificial Sequence
  synthetic
  misc_feature (1)..(19): ribonucleotides
ccgucacuuaggaugaaautt

SEQ ID NO: 2045 - DNA, 21 bp, Artificial Sequence
  synthetic
  misc_feature (1)..(19): ribonucleotides
auauacugcuuguuccgcctt

SEQ ID NO: 2046 - DNA, 21 bp, Artificial Sequence
  synthetic
  misc_feature (1)..(19): ribonucleotides
uacugcuuguuccgccagctt

SEQ ID NO: 2047 - DNA, 21 bp, Artificial Sequence
  synthetic
  misc_feature (1)..(19): ribonucleotides
auuaauugauggccauccgtt

SEQ ID NO: 2048 - DNA, 21 bp, Artificial Sequence
  synthetic
  misc_feature (1)..(19): ribonucleotides
uaaguaugcuagagucccgtt

SEQ ID NO: 2049 - DNA, 21 bp, Artificial Sequence
  synthetic
  misc_feature (1)..(19): ribonucleotides
aagcuuuauuaucugggugtt

SEQ ID NO: 2050 - DNA, 21 bp, Artificial Sequence
  synthetic
  misc_feature (1)..(19): ribonucleotides
uuacaaguauucucauccctt

SEQ ID NO: 2051 - DNA, 21 bp, Artificial Sequence
  synthetic
  misc_feature (1)..(19): ribonucleotides
uuguaguugaauacaggagtt

SEQ ID NO: 2052 - DNA, 21 bp, Artificial Sequence
  synthetic
  misc_feature (1)..(19): ribonucleotides
auuucauccuaagugacggtt

SEQ ID NO: 2053 - DNA, 21 bp, Artificial Sequence
  synthetic
  misc_feature (1)..(19): ribonucleotides
  misc_feature (1)..(1): 5'-3 attached deoxy abasic moiety
  misc_feature (3)..(3): 2'-deoxy-2'-fluoro
  misc_feature (8)..(8): 2'-deoxy-2'-fluoro
  misc_feature (12)..(12): 2'-deoxy-2'-fluoro
  misc_feature (15)..(15): 2'-deoxy-2'-fluoro
  misc_feature (17)..(17): 2'-deoxy-2'-fluoro
  misc_feature (19)..(19): 2'-deoxy-2'-fluoro
  misc_feature (21)..(21): 3'-3 attached deoxy abasic moiety
ggcggaacaagcaguauautt

SEQ ID NO: 2054 - DNA, 21 bp, Artificial Sequence
  synthetic
  misc_feature (1)..(19): ribonucleotides
  misc_feature (1)..(1): 5'-3 attached deoxy abasic moiety
  misc_feature (3)..(3): 2'-deoxy-2'-fluoro
  misc_feature (6)..(6): 2'-deoxy-2'-fluoro
  misc_feature (11)..(11): 2'-deoxy-2'-fluoro
  misc_feature (15)..(15): 2'-deoxy-2'-fluoro
  misc_feature (18)..(18): 2'-deoxy-2'-fluoro
  misc_feature (21)..(21): 3'-3 attached deoxy abasic moiety
gcuggcggaacaagcaguatt

SEQ ID NO: 2055 - DNA, 21 bp, Artificial Sequence
  synthetic
  misc_feature (1)..(19): ribonucleotides
  misc_feature (1)..(1): 2'-deoxy-2'-fluoro
  misc_feature (1)..(1): 5'-3 attached deoxy abasic moiety
  misc_feature (5)..(5): 2'-deoxy-2'-fluoro
  misc_feature (8)..(9): 2'-deoxy-2'-fluoro
  misc_feature (11)..(12): 2'-deoxy-2'-fluoro
  misc_feature (15)..(16): 2'-deoxy-2'-fluoro
  misc_feature (19)..(19): 2'-deoxy-2'-fluoro
  misc_feature (21)..(21): 3'-3 attached deoxy abasic moiety
cggauggccaucaauuaautt

SEQ ID NO: 2056 - DNA, 21 bp, Artificial Sequence
  synthetic
  misc_feature (1)..(19): ribonucleotides
  misc_feature (1)..(1): 2'-deoxy-2'-fluoro
  misc_feature (1)..(1): 5'-3 attached deoxy abasic moiety
  misc_feature (6)..(9): 2'-deoxy-2'-fluoro
  misc_feature (12)..(12): 2'-deoxy-2'-fluoro
  misc_feature (14)..(14): 2'-deoxy-2'-fluoro
  misc_feature (16)..(18): 2'-deoxy-2'-fluoro
  misc_feature (21)..(21): 3'-3 attached deoxy abasic moiety
cgggacucuagcauacuuatt

SEQ ID NO: 2057 - DNA, 21 bp, Artificial Sequence
  synthetic
  misc_feature (1)..(19): ribonucleotides
  misc_feature (1)..(1): 2'-deoxy-2'-fluoro
  misc_feature (1)..(1): 5'-3 attached deoxy abasic moiety
  misc_feature (3)..(5): 2'-deoxy-2'-fluoro
  misc_feature (9)..(9): 2'-deoxy-2'-fluoro
  misc_feature (12)..(12): 2'-deoxy-2'-fluoro
  misc_feature (17)..(19): 2'-deoxy-2'-fluoro
  misc_feature (21)..(21): 3'-3 attached deoxy abasic moiety
cacccagauaauaaagcuutt

SEQ ID NO: 2058 - DNA, 21 bp, Artificial Sequence
  synthetic
  misc_feature (1)..(19): ribonucleotides
  misc_feature (1)..(1): 5'-3 attached deoxy abasic moiety
  misc_feature (5)..(5): 2'-deoxy-2'-fluoro
  misc_feature (11)..(11): 2'-deoxy-2'-fluoro
  misc_feature (13)..(15): 2'-deoxy-2'-fluoro
  misc_feature (17)..(17): 2'-deoxy-2'-fluoro
  misc_feature (21)..(21): 3'-3 attached deoxy abasic moiety
gggaugagaauacuuguaatt

SEQ ID NO: 2059 - DNA, 21 bp, Artificial Sequence
  synthetic
  misc_feature (1)..(19): ribonucleotides
  misc_feature (1)..(5): 2'-deoxy-2'-fluoro
  misc_feature (1)..(1): 5'-3 attached deoxy abasic moiety
  misc_feature (7)..(7): 2'-deoxy-2'-fluoro
  misc_feature (9)..(11): 2'-deoxy-2'-fluoro
  misc_feature (14)..(15): 2'-deoxy-2'-fluoro
  misc_feature (17)..(17): 2'-deoxy-2'-fluoro
  misc_feature (21)..(21): 3'-3 attached deoxy abasic moiety
cuccuguauucaacuacaatt

SEQ ID NO: 2060 - DNA, 21 bp, Artificial Sequence
  synthetic
  misc_feature (1)..(19): ribonucleotides
  misc_feature (1)..(2): 2'-deoxy-2'-fluoro
  misc_feature (1)..(1): 5'-3 attached deoxy abasic moiety
  misc_feature (4)..(5): 2'-deoxy-2'-fluoro
  misc_feature (7)..(9): 2'-deoxy-2'-fluoro
  misc_feature (14)..(14): 2'-deoxy-2'-fluoro
  misc_feature (19)..(19): 2'-deoxy-2'-fluoro
  misc_feature (21)..(21): 3'-3 attached deoxy abasic moiety
ccgucacuuaggaugaaautt

SEQ ID NO: 2061 - DNA, 21 bp, Artificial Sequence
  synthetic
  misc_feature (1)..(19): ribonucleotides
  misc_feature (2)..(2): 2'-deoxy-2'-fluoro
  misc_feature (4)..(4): 2'-deoxy-2'-fluoro
  misc_feature (6)..(7): 2'-deoxy-2'-fluoro
  misc_feature (9)..(11): 2'-deoxy-2'-fluoro
  misc_feature (13)..(16): 2'-deoxy-2'-fluoro
  misc_feature (18)..(19): 2'-deoxy-2'-fluoro
  misc_feature (20)..(20): Phosphorothioate 3'-Internucleotide Linkage
auauacugcuuguuccgcctt

SEQ ID NO: 2062 - DNA, 21 bp, Artificial Sequence
  synthetic
  misc_feature (1)..(19): ribonucleotides
  misc_feature (1)..(1): 2'-deoxy-2'-fluoro
  misc_feature (3)..(4): 2'-deoxy-2'-fluoro
  misc_feature (6)..(8): 2'-deoxy-2'-fluoro
  misc_feature (10)..(13): 2'-deoxy-2'-fluoro
  misc_feature (15)..(16): 2'-deoxy-2'-fluoro
  misc_feature (19)..(19): 2'-deoxy-2'-fluoro
  misc_feature (20)..(20): Phosphorothioate 3'-Internucleotide Linkage
uacugcuuguuccgccagctt

SEQ ID NO: 2063 - DNA, 21 bp, Artificial Sequence
  synthetic
  misc_feature (1)..(19): ribonucleotides
  misc_feature (2)..(3): 2'-deoxy-2'-fluoro
  misc_feature (6)..(7): 2'-deoxy-2'-fluoro
  misc_feature (10)..(10): 2'-deoxy-2'-fluoro
  misc_feature (13)..(14): 2'-deoxy-2'-fluoro
  misc_feature (16)..(18): 2'-deoxy-2'-fluoro
  misc_feature (20)..(20): Phosphorothioate 3'-Internucleotide Linkage
auuaauugauggccauccgtt

SEQ ID NO: 2064 - DNA, 21 bp, Artificial Sequence
  synthetic
  misc_feature (1)..(19): ribonucleotides
  misc_feature (1)..(1): 2'-deoxy-2'-fluoro
  misc_feature (5)..(5): 2'-deoxy-2'-fluoro
  misc_feature (7)..(7): 2'-deoxy-2'-fluoro
  misc_feature (9)..(10): 2'-deoxy-2'-fluoro
  misc_feature (15)..(18): 2'-deoxy-2'-fluoro
  misc_feature (20)..(20): Phosphorothioate 3'-Internucleotide Linkage
uaaguaugcuagagucccgtt

SEQ ID NO: 2065 - DNA, 21 bp, Artificial Sequence
  synthetic
  misc_feature (1)..(19): ribonucleotides
  misc_feature (4)..(7): 2'-deoxy-2'-fluoro
  misc_feature (9)..(10): 2'-deoxy-2'-fluoro
  misc_feature (12)..(14): 2'-deoxy-2'-fluoro
  misc_feature (18)..(18): 2'-deoxy-2'-fluoro
  misc_feature (20)..(20): Phosphorothioate 3'-Internucleotide Linkage
aagcuuuauuaucugggugtt

SEQ ID NO: 2066 - DNA, 21 bp, Artificial Sequence
  synthetic
  misc_feature (1)..(19): ribonucleotides
  misc_feature (1)..(2): 2'-deoxy-2'-fluoro
  misc_feature (4)..(4): 2'-deoxy-2'-fluoro
  misc_feature (8)..(8): 2'-deoxy-2'-fluoro
  misc_feature (10)..(14): 2'-deoxy-2'-fluoro
  misc_feature (16)..(19): 2'-deoxy-2'-fluoro
  misc_feature (20)..(20): Phosphorothioate 3'-Internucleotide Linkage
uuacaaguauucucauccctt

SEQ ID NO: 2067 - DNA, 21 bp, Artificial Sequence
  synthetic
  misc_feature (1)..(19): ribonucleotides
  misc_feature (1)..(2): 2'-deoxy-2'-fluoro
  misc_feature (4)..(4): 2'-deoxy-2'-fluoro
  misc_feature (7)..(8): 2'-deoxy-2'-fluoro
  misc_feature (12)..(12): 2'-deoxy-2'-fluoro
  misc_feature (14)..(14): 2'-deoxy-2'-fluoro
  misc_feature (20)..(20): Phosphorothioate 3'-Internucleotide Linkage
uuguaguugaauacaggagtt

SEQ ID NO: 2068 - DNA, 21 bp, Artificial Sequence
  synthetic
  misc_feature (1)..(19): ribonucleotides
  misc_feature (2)..(5): 2'-deoxy-2'-fluoro
  misc_feature (7)..(10): 2'-deoxy-2'-fluoro
  misc_feature (14)..(14): 2'-deoxy-2'-fluoro
  misc_feature (17)..(17): 2'-deoxy-2'-fluoro
  misc_feature (20)..(20): Phosphorothioate 3'-Internucleotide Linkage
auuucauccuaagugacggtt

SEQ ID NO: 2069 - DNA, 21 bp, Artificial Sequence
  synthetic
  misc_feature (1)..(19): ribonucleotides
  misc_feature (1)..(2): deoxy
  misc_feature (1)..(1): 5'-3 attached deoxy abasic moiety
  misc_feature (3)..(3): 2'-deoxy-2'-fluoro
  misc_feature (4)..(7): deoxy
  misc_feature (8)..(8): 2'-deoxy-2'-fluoro
  misc_feature (9)..(11): deoxy
  misc_feature (12)..(12): 2'-deoxy-2'-fluoro
  misc_feature (13)..(14): deoxy
  misc_feature (15)..(15): 2'-deoxy-2'-fluoro
  misc_feature (16)..(16): deoxy
  misc_feature (17)..(17): 2'-deoxy-2'-fluoro
  misc_feature (18)..(18): deoxy
  misc_feature (19)..(19): 2'-deoxy-2'-fluoro
  misc_feature (21)..(21): 3'-3 attached deoxy abasic moiety
ggcggaacaagcaguauautt

SEQ ID NO: 2070 - DNA, 21 bp, Artificial Sequence
  synthetic
  misc_feature (1)..(19): ribonucleotides
  misc_feature (1)..(1): deoxy
  misc_feature (1)..(1): 5'-3 attached deoxy abasic moiety
  misc_feature (2)..(3): 2'-deoxy-2'-fluoro
  misc_feature (4)..(5): deoxy
  misc_feature (6)..(6): 2'-deoxy-2'-fluoro
  misc_feature (7)..(10): deoxy
  misc_feature (11)..(11): 2'-deoxy-2'-fluoro
  misc_feature (12)..(14): deoxy
  misc_feature (15)..(15): 2'-deoxy-2'-fluoro
  misc_feature (16)..(17): deoxy
  misc_feature (18)..(18): 2'-deoxy-2'-fluoro
  misc_feature (19)..(19): deoxy
  misc_feature (21)..(21): 3'-3 attached deoxy abasic moiety
gcuggcggaacaagcaguatt

SEQ ID NO: 2071 - DNA, 21 bp, Artificial Sequence
  synthetic
  misc_feature (1)..(19): ribonucleotides
  misc_feature (1)..(1): 2'-deoxy-2'-fluoro
  misc_feature (1)..(1): 5'-3 attached deoxy abasic moiety
  misc_feature (2)..(4): deoxy
  misc_feature (5)..(5): 2'-deoxy-2'-fluoro
  misc_feature (6)..(7): deoxy
  misc_feature (8)..(9): 2'-deoxy-2'-fluoro
  misc_feature (10)..(10): deoxy
  misc_feature (11)..(12): 2'-deoxy-2'-fluoro
  misc_feature (13)..(14): deoxy
  misc_feature (15)..(16): 2'-deoxy-2'-fluoro
  misc_feature (17)..(18): deoxy
  misc_feature (19)..(19): 2'-deoxy-2'-fluoro
  misc_feature (21)..(21): 3'-3 attached deoxy abasic moiety
cggauggccaucaauuaautt

SEQ ID NO: 2072 - DNA, 21 bp, Artificial Sequence
  synthetic
  misc_feature (1)..(19): ribonucleotides
  misc_feature (1)..(1): 2'-deoxy-2'-fluoro
  misc_feature (1)..(1): 5'-3 attached deoxy abasic moiety
  misc_feature (2)..(5): deoxy
  misc_feature (6)..(9): 2'-deoxy-2'-fluoro
  misc_feature (10)..(11): deoxy
  misc_feature (12)..(12): 2'-deoxy-2'-fluoro
  misc_feature (13)..(13): deoxy
  misc_feature (14)..(14): 2'-deoxy-2'-fluoro
  misc_feature (15)..(15): deoxy
  misc_feature (16)..(18): 2'-deoxy-2'-fluoro
  misc_feature (19)..(19): deoxy
  misc_feature (21)..(21): 3'-3 attached deoxy abasic moiety
cgggacucuagcauacuuatt

SEQ ID NO: 2073 - DNA, 21 bp, Artificial Sequence
  synthetic
  misc_feature (1)..(19): ribonucleotides
  misc_feature (1)..(1): 2'-deoxy-2'-fluoro
  misc_feature (1)..(1): 5'-3 attached deoxy abasic moiety
  misc_feature (2)..(2): deoxy
  misc_feature (3)..(5): 2'-deoxy-2'-fluoro
  misc_feature (6)..(8): deoxy
  misc_feature (9)..(9): 2'-deoxy-2'-fluoro
  misc_feature (10)..(11): deoxy
  misc_feature (12)..(12): 2'-deoxy-2'-fluoro
  misc_feature (13)..(16): deoxy
  misc_feature (17)..(19): 2'-deoxy-2'-fluoro
  misc_feature (21)..(21): 3'-3 attached deoxy abasic moiety
cacccagauaauaaagcuutt

SEQ ID NO: 2074 - DNA, 21 bp, Artificial Sequence
  synthetic
  misc_feature (1)..(19): ribonucleotides
  misc_feature (1)..(4): deoxy
  misc_feature (1)..(1): 5'-3 attached deoxy abasic moiety
  misc_feature (5)..(5): 2'-deoxy-2'-fluoro
  misc_feature (6)..(10): deoxy
  misc_feature (11)..(11): 2'-deoxy-2'-fluoro
  misc_feature (12)..(12): deoxy
  misc_feature (13)..(15): 2'-deoxy-2'-fluoro
  misc_feature (16)..(16): deoxy
  misc_feature (17)..(17): 2'-deoxy-2'-fluoro
  misc_feature (18)..(19): deoxy
  misc_feature (21)..(21): 3'-3 attached deoxy abasic moiety
gggaugagaauacuuguaatt

SEQ ID NO: 2075 - DNA, 21 bp, Artificial Sequence
  synthetic
  misc_feature (1)..(19): ribonucleotides
  misc_feature (1)..(5): 2'-deoxy-2'-fluoro
  misc_feature (1)..(1): 5'-3 attached deoxy abasic moiety
  misc_feature (6)..(6): deoxy
  misc_feature (7)..(7): 2'-deoxy-2'-fluoro
  misc_feature (8)..(8): deoxy
  misc_feature (9)..(11): 2'-deoxy-2'-fluoro
  misc_feature (12)..(13): deoxy
  misc_feature (14)..(15): 2'-deoxy-2'-fluoro
  misc_feature (16)..(16): deoxy
  misc_feature (17)..(17): 2'-deoxy-2'-fluoro
  misc_feature (18)..(19): deoxy
  misc_feature (21)..(21): 3'-3 attached deoxy abasic moiety
cuccuguauucaacuacaatt

SEQ ID NO: 2076 - DNA, 21 bp, Artificial Sequence
  synthetic
  misc_feature (1)..(19): ribonucleotides
  misc_feature (1)..(2): 2'-deoxy-2'-fluoro
  misc_feature (1)..(1): 5'-3 attached deoxy abasic moiety
  misc_feature (3)..(3): deoxy
  misc_feature (4)..(5): 2'-deoxy-2'-fluoro
  misc_feature (6)..(6): deoxy
  misc_feature (7)..(9): 2'-deoxy-2'-fluoro
  misc_feature (10)..(13): deoxy
  misc_feature (14)..(14): 2'-deoxy-2'-fluoro
  misc_feature (15)..(18): deoxy
  misc_feature (19)..(19): 2'-deoxy-2'-fluoro
  misc_feature (21)..(21): 3'-3 attached deoxy abasic moiety
ccgucacuuaggaugaaautt

SEQ ID NO: 2077 - DNA, 21 bp, Artificial Sequence
  synthetic
  misc_feature (1)..(19): ribonucleotides
  misc_feature (1)..(1): deoxy
  misc_feature (2)..(2): 2'-deoxy-2'-fluoro
  misc_feature (3)..(3): deoxy
  misc_feature (4)..(4): 2'-deoxy-2'-fluoro
  misc_feature (5)..(5): deoxy
  misc_feature (6)..(7): 2'-deoxy-2'-fluoro
  misc_feature (8)..(11): 2'-deoxy-2'-fluoro
  misc_feature (8)..(8): deoxy
  misc_feature (12)..(12): deoxy
  misc_feature (13)..(16): 2'-deoxy-2'-fluoro
  misc_feature (17)..(17): deoxy
  misc_feature (18)..(19): 2'-deoxy-2'-fluoro
  misc_feature (20)..(20): Phosphorothioate 3'-Internucleotide Linkage
auauacugcuuguuccgcctt

SEQ ID NO: 2078 - DNA, 21 bp, Artificial Sequence
  synthetic
  misc_feature (1)..(19): ribonucleotides
  misc_feature (1)..(1): 2'-deoxy-2'-fluoro
  misc_feature (2)..(2): deoxy
  misc_feature (3)..(4): 2'-deoxy-2'-fluoro
  misc_feature (5)..(5): deoxy
  misc_feature (6)..(8): 2'-deoxy-2'-fluoro
  misc_feature (9)..(9): deoxy
  misc_feature (10)..(13): 2'-deoxy-2'-fluoro
  misc_feature (14)..(14): deoxy
  misc_feature (15)..(16): 2'-deoxy-2'-fluoro
  misc_feature (17)..(18): deoxy
  misc_feature (19)..(19): 2'-deoxy-2'-fluoro
  misc_feature (20)..(20): Phosphorothioate 3'-Internucleotide Linkage
  misc_feature (20)..(20)
uacugcuuguuccgccagctt

SEQ ID NO: 2079 - DNA, 21 bp, Artificial Sequence
  synthetic
  misc_feature (1)..(19): ribonucleotides
  misc_feature (1)..(1): deoxy
  misc_feature (2)..(3): 2'-deoxy-2'-fluoro
  misc_feature (4)..(5): deoxy
  misc_feature (6)..(7): 2'-deoxy-2'-fluoro
  misc_feature (8)..(9): deoxy
  misc_feature (10)..(10): 2'-deoxy-2'-fluoro
  misc_feature (11)..(12): deoxy
  misc_feature (13)..(14): 2'-deoxy-2'-fluoro
  misc_feature (15)..(15): deoxy
  misc_feature (16)..(18): 2'-deoxy-2'-fluoro
  misc_feature (19)..(19): deoxy
  misc_feature (20)..(20): Phosphorothioate 3'-Internucleotide Linkage
auuaauugauggccauccgtt

SEQ ID NO: 2080 - DNA, 21 bp, Artificial Sequence
  synthetic
  misc_feature (1)..(19): ribonucleotides
  misc_feature (1)..(1): 2'-deoxy-2'-fluoro
  misc_feature (2)..(4): deoxy
  misc_feature (5)..(5): 2'-deoxy-2'-fluoro
  misc_feature (6)..(6): deoxy
  misc_feature (7)..(7): 2'-deoxy-2'-fluoro
  misc_feature (8)..(8): deoxy
  misc_feature (9)..(10): 2'-deoxy-2'-fluoro
  misc_feature (11)..(14): deoxy
  misc_feature (15)..(18): 2'-deoxy-2'-fluoro
  misc_feature (19)..(19): deoxy
  misc_feature (20)..(20): Phosphorothioate 3'-Internucleotide Linkage
uaaguaugcuagagucccgtt

SEQ ID NO: 2081 - DNA, 21 bp, Artificial Sequence
  synthetic
  misc_feature (1)..(19): ribonucleotides
  misc_feature (1)..(3): deoxy
  misc_feature (4)..(7): 2'-deoxy-2'-fluoro
  misc_feature (8)..(8): deoxy
  misc_feature (9)..(10): 2'-deoxy-2'-fluoro
  misc_feature (11)..(11): deoxy
  misc_feature (12)..(14): 2'-deoxy-2'-fluoro
  misc_feature (15)..(17): deoxy
  misc_feature (18)..(18): 2'-deoxy-2'-fluoro
  misc_feature (19)..(19): deoxy
  misc_feature (20)..(20): Phosphorothioate 3'-Internucleotide Linkage
aagcuuuauuaucugggugtt

SEQ ID NO: 2082 - DNA, 21 bp, Artificial Sequence
  synthetic
  misc_feature (1)..(19): ribonucleotides
  misc_feature (1)..(2): 2'-deoxy-2'-fluoro
  misc_feature (3)..(3): deoxy
  misc_feature (4)..(4): 2'-deoxy-2'-fluoro
  misc_feature (5)..(7): deoxy
  misc_feature (8)..(8): 2'-deoxy-2'-fluoro
  misc_feature (9)..(9): deoxy
  misc_feature (10)..(14): 2'-deoxy-2'-fluoro
  misc_feature (15)..(15): deoxy
  misc_feature (16)..(19): 2'-deoxy-2'-fluoro
  misc_feature (20)..(20): Phosphorothioate 3'-Internucleotide Linkage
uuacaaguauucucauccctt

SEQ ID NO: 2083 - DNA, 21 bp, Artificial Sequence
  synthetic
  misc_feature (1)..(19): ribonucleotides
  misc_feature (1)..(2): 2'-deoxy-2'-fluoro
  misc_feature (3)..(3): deoxy
  misc_feature (4)..(4): 2'-deoxy-2'-fluoro
  misc_feature (5)..(6): deoxy
  misc_feature (7)..(8): 2'-deoxy-2'-fluoro
  misc_feature (9)..(11): deoxy
  misc_feature (12)..(12): 2'-deoxy-2'-fluoro
  misc_feature (13)..(13): deoxy
  misc_feature (14)..(14): 2'-deoxy-2'-fluoro
  misc_feature (15)..(19): deoxy
  misc_feature (20)..(20): Phosphorothioate 3'-Internucleotide Linkage
uuguaguugaauacaggagtt

SEQ ID NO: 2084 - DNA, 21 bp, Artificial Sequence
  synthetic
  misc_feature (1)..(19): ribonucleotides
  misc_feature (1)..(1): deoxy
  misc_feature (2)..(5): 2'-deoxy-2'-fluoro
  misc_feature (6)..(6): deoxy
  misc_feature (7)..(10): 2'-deoxy-2'-fluoro
  misc_feature (11)..(13): deoxy
  misc_feature (14)..(14): 2'-deoxy-2'-fluoro
  misc_feature (15)..(16): deoxy
  misc_feature (17)..(17): 2'-deoxy-2'-fluoro
  misc_feature (18)..(19): deoxy
  misc_feature (20)..(20): Phosphorothioate 3'-Internucleotide Linkage
auuucauccuaagugacggtt

SEQ ID NO: 2085 - DNA, 21 bp, Artificial Sequence
  synthetic
  misc_feature (1)..(19): ribonucleotides
  misc_feature (1)..(2): 2'-O-methyl
  misc_feature (1)..(1): 5'-3 attached deoxy abasic moiety
  misc_feature (3)..(3): 2'-deoxy-2'-fluoro
  misc_feature (4)..(7): 2'-O-methyl
  misc_feature (8)..(8): 2'-deoxy-2'-fluoro
  misc_feature (9)..(11): 2'-O-methyl
  misc_feature (12)..(12): 2'-deoxy-2'-fluoro
  misc_feature (13)..(14): 2'-O-methyl
  misc_feature (15)..(15): 2'-deoxy-2'-fluoro
  misc_feature (16)..(16): 2'-O-methyl
  misc_feature (17)..(17): 2'-deoxy-2'-fluoro
  misc_feature (18)..(18): 2'-O-methyl
  misc_feature (19)..(19): 2'-deoxy-2'-fluoro
  misc_feature (21)..(21): 3'-3 attached deoxy abasic moiety
ggcggaacaagcaguauautt

SEQ ID NO: 2086 - DNA, 21 bp, Artificial Sequence
  synthetic
  misc_feature (1)..(19): ribonucleotides
  misc_feature (1)..(1): 2'-O-methyl
  misc_feature (1)..(1): 5'-3 attached deoxy abasic moiety
  misc_feature (2)..(3): 2'-deoxy-2'-fluoro
  misc_feature (4)..(5): 2'-O-methyl
  misc_feature (6)..(6): 2'-deoxy-2'-fluoro
  misc_feature (7)..(10): 2'-O-methyl
  misc_feature (11)..(11): 2'-deoxy-2'-fluoro
  misc_feature (12)..(14): 2'-O-methyl
  misc_feature (15)..(15): 2'-deoxy-2'-fluoro
  misc_feature (16)..(17): 2'-O-methyl
  misc_feature (18)..(18): 2'-deoxy-2'-fluoro
  misc_feature (19)..(19): 2'-O-methyl
  misc_feature (21)..(21): 3'-3 attached deoxy abasic moiety
gcuggcggaacaagcaguatt

SEQ ID NO: 2087 - DNA, 21 bp, Artificial Sequence
  synthetic
  misc_feature (1)..(19): ribonucleotides
  misc_feature (1)..(1): 2'-deoxy-2'-fluoro
  misc_feature (1)..(1): 5'-3 attached deoxy abasic moiety
  misc_feature (2)..(4): 2'-O-methyl
  misc_feature (5)..(5): 2'-deoxy-2'-fluoro
  misc_feature (6)..(7): 2'-O-methyl
  misc_feature (8)..(9): 2'-deoxy-2'-fluoro
  misc_feature (10)..(10): 2'-O-methyl
  misc_feature (11)..(12): 2'-deoxy-2'-fluoro
  misc_feature (13)..(14): 2'-O-methyl
  misc_feature (15)..(16): 2'-deoxy-2'-fluoro
  misc_feature (17)..(18): 2'-O-methyl
  misc_feature (19)..(19): 2'-deoxy-2'-fluoro
  misc_feature (21)..(21): 3'-3 attached deoxy abasic moiety
cggauggccaucaauuaautt

SEQ ID NO: 2088 - DNA, 21 bp, Artificial Sequence
  synthetic
  misc_feature (1)..(19): ribonucleotides
  misc_feature (1)..(1): 2'-deoxy-2'-fluoro
  misc_feature (1)..(1): 5'-3 attached deoxy abasic moiety
  misc_feature (2)..(5): 2'-O-methyl
  misc_feature (6)..(9): 2'-deoxy-2'-fluoro
  misc_feature (10)..(11): 2'-O-methyl
  misc_feature (12)..(12): 2'-deoxy-2'-fluoro
  misc_feature (13)..(13): 2'-O-methyl
  misc_feature (14)..(14): 2'-deoxy-2'-fluoro
  misc_feature (15)..(15): 2'-O-methyl
  misc_feature (16)..(18): 2'-deoxy-2'-fluoro
  misc_feature (19)..(19): 2'-O-methyl
  misc_feature (21)..(21): 3'-3 attached deoxy abasic moiety
cgggacucuagcauacuuatt

SEQ ID NO: 2089 - DNA, 21 bp, Artificial Sequence
  synthetic
  misc_feature (1)..(19): ribonucleotides
  misc_feature (1)..(1): 2'-deoxy-2'-fluoro
  misc_feature (1)..(1): 5'-3 attached deoxy abasic moiety
  misc_feature (2)..(2): 2'-O-methyl
  misc_feature (3)..(5): 2'-deoxy-2'-fluoro
  misc_feature (6)..(8): 2'-O-methyl
  misc_feature (9)..(9): 2'-deoxy-2'-fluoro
  misc_feature (10)..(11): 2'-O-methyl
  misc_feature (12)..(12): 2'-deoxy-2'-fluoro
  misc_feature (13)..(16): 2'-O-methyl
  misc_feature (17)..(19): 2'-deoxy-2'-fluoro
  misc_feature (21)..(21): 3'-3 attached deoxy abasic moiety
cacccagauaauaaagcuutt

SEQ ID NO: 2090 - DNA, 21 bp, Artificial Sequence
  synthetic
  misc_feature (1)..(19): ribonucleotides
  misc_feature (1)..(4): 2'-O-methyl
  misc_feature (1)..(1): 5'-3 attached deoxy abasic moiety
  misc_feature (5)..(5): 2'-deoxy-2'-fluoro
  misc_feature (6)..(10): 2'-O-methyl
  misc_feature (11)..(11): 2'-deoxy-2'-fluoro
  misc_feature (12)..(12): 2'-O-methyl
  misc_feature (13)..(15): 2'-deoxy-2'-fluoro
  misc_feature (16)..(16): 2'-O-methyl
  misc_feature (17)..(17): 2'-deoxy-2'-fluoro
  misc_feature (18)..(19): 2'-O-methyl
  misc_feature (21)..(21): 3'-3 attached deoxy abasic moiety
gggaugagaauacuuguaatt

SEQ ID NO: 2091 - DNA, 21 bp, Artificial Sequence
  synthetic
  misc_feature (1)..(19): ribonucleotides
  misc_feature (1)..(5): 2'-deoxy-2'-fluoro
  misc_feature (1)..(1): 5'-3 attached deoxy abasic moiety
  misc_feature (6)..(6): 2'-O-methyl
  misc_feature (7)..(7): 2'-deoxy-2'-fluoro
  misc_feature (8)..(8): 2'-O-methyl
  misc_feature (9)..(11): 2'-deoxy-2'-fluoro
  misc_feature (12)..(13): 2'-O-methyl
  misc_feature (14)..(15): 2'-deoxy-2'-fluoro
  misc_feature (16)..(16): 2'-O-methyl
  misc_feature (17)..(17): 2'-deoxy-2'-fluoro
  misc_feature (18)..(19): 2'-O-methyl
  misc_feature (21)..(21): 3'-3 attached deoxy abasic moiety
cuccuguauucaacuacaatt

SEQ ID NO: 2092 - DNA, 21 bp, Artificial Sequence
  synthetic
  misc_feature (1)..(19): ribonucleotides
  misc_feature (1)..(2): 2'-deoxy-2'-fluoro
  misc_feature (1)..(1): 5'-3 attached deoxy abasic moiety
  misc_feature (3)..(3): 2'-O-methyl
  misc_feature (4)..(5): 2'-deoxy-2'-fluoro
  misc_feature (6)..(6): 2'-O-methyl
  misc_feature (7)..(9): 2'-deoxy-2'-fluoro
  misc_feature (10)..(13): 2'-O-methyl
  misc_feature (14)..(14): 2'-deoxy-2'-fluoro
  misc_feature (15)..(18): 2'-O-methyl
  misc_feature (19)..(19): 2'-deoxy-2'-fluoro
  misc_feature (21)..(21): 3'-3 attached deoxy abasic moiety
ccgucacuuaggaugaaautt

SEQ ID NO: 2093 - DNA, 21 bp, Artificial Sequence
  synthetic
  misc_feature (1)..(19): ribonucleotides
  misc_feature (1)..(1): 2'-O-methyl
  misc_feature (2)..(2): 2'-deoxy-2'-fluoro
  misc_feature (3)..(3): 2'-O-methyl
  misc_feature (4)..(4): 2'-deoxy-2'-fluoro
  misc_feature (5)..(5): 2'-O-methyl
  misc_feature (6)..(7): 2'-deoxy-2'-fluoro
  misc_feature (8)..(8): 2'-O-methyl
  misc_feature (9)..(11): 2'-deoxy-2'-fluoro
  misc_feature (12)..(12): 2'-O-methyl
  misc_feature (13)..(16): 2'-deoxy-2'-fluoro
  misc_feature (17)..(17): 2'-O-methyl
  misc_feature (18)..(19): 2'-deoxy-2'-fluoro
  misc_feature (20)..(20): Phosphorothioate 3'-Internucleotide Linkage
auauacugcuuguuccgcctt

SEQ ID NO: 2094 - DNA, 21 bp, Artificial Sequence
  synthetic
  misc_feature (1)..(19): ribonucleotides
  misc_feature (1)..(1): 2'-deoxy-2'-fluoro
  misc_feature (2)..(2): 2'-O-methyl
  misc_feature (3)..(4): 2'-deoxy-2'-fluoro
  misc_feature (5)..(5): 2'-O-methyl
  misc_feature (6)..(8): 2'-deoxy-2'-fluoro
  misc_feature (9)..(9): 2'-O-methyl
  misc_feature (10)..(13): 2'-deoxy-2'-fluoro
  misc_feature (14)..(14): 2'-O-methyl
  misc_feature (15)..(16): 2'-deoxy-2'-fluoro
  misc_feature (17)..(18): 2'-O-methyl
  misc_feature (19)..(19): 2'-deoxy-2'-fluoro
  misc_feature (20)..(20): Phosphorothioate 3'-Internucleotide Linkage
uacugcuuguuccgccagctt

SEQ ID NO: 2095 - DNA, 21 bp, Artificial Sequence
  synthetic
  misc_feature (1)..(19): ribonucleotides
  misc_feature (1)..(1): 2'-O-methyl
  misc_feature (2)..(3): 2'-deoxy-2'-fluoro
  misc_feature (4)..(5): 2'-O-methyl
  misc_feature (6)..(7): 2'-deoxy-2'-fluoro
  misc_feature (8)..(9): 2'-O-methyl
  misc_feature (10)..(10): 2'-deoxy-2'-fluoro
  misc_feature (11)..(12): 2'-O-methyl
  misc_feature (13)..(14): 2'-deoxy-2'-fluoro
  misc_feature (15)..(15): 2'-O-methyl
  misc_feature (16)..(18): 2'-deoxy-2'-fluoro
  misc_feature (19)..(19): 2'-O-methyl
  misc_feature (20)..(20): Phosphorothioate 3'-Internucleotide Linkage
auuaauugauggccauccgtt

SEQ ID NO: 2096 - DNA, 21 bp, Artificial Sequence
  synthetic
  misc_feature (1)..(19): ribonucleotides
  misc_feature (1)..(1): 2'-deoxy-2'-fluoro
  misc_feature (2)..(4): 2'-O-methyl
  misc_feature (5)..(5): 2'-deoxy-2'-fluoro
  misc_feature (6)..(6): 2'-O-methyl
  misc_feature (7)..(7): 2'-deoxy-2'-fluoro
  misc_feature (8)..(8): 2'-O-methyl
  misc_feature (9)..(10): 2'-deoxy-2'-fluoro
  misc_feature (11)..(14): 2'-O-methyl
  misc_feature (15)..(18): 2'-deoxy-2'-fluoro
  misc_feature (19)..(19): 2'-O-methyl
  misc_feature (20)..(20): Phosphorothioate 3'-Internucleotide Linkage
uaaguaugcuagagucccgtt

SEQ ID NO: 2097 - DNA, 21 bp, Artificial Sequence
  synthetic
  misc_feature (1)..(19): ribonucleotides
  misc_feature (1)..(3): 2'-O-methyl
  misc_feature (4)..(7): 2'-deoxy-2'-fluoro
  misc_feature (8)..(8): 2'-O-methyl
  misc_feature (9)..(10): 2'-deoxy-2'-fluoro
  misc_feature (11)..(11): 2'-O-methyl
  misc_feature (12)..(14): 2'-deoxy-2'-fluoro
  misc_feature (15)..(17): 2'-O-methyl
  misc_feature (18)..(18): 2'-deoxy-2'-fluoro
  misc_feature (19)..(19): 2'-O-methyl
  misc_feature (20)..(20): Phosphorothioate 3'-Internucleotide Linkage
aagcuuuauuaucugggugtt

SEQ ID NO: 2098 - DNA, 21 bp, Artificial Sequence
  synthetic
  misc_feature (1)..(19): ribonucleotides
  misc_feature (1)..(2): 2'-deoxy-2'-fluoro
  misc_feature (3)..(3): 2'-O-methyl
  misc_feature (4)..(4): 2'-deoxy-2'-fluoro
  misc_feature (5)..(7): 2'-O-methyl
  misc_feature (8)..(8): 2'-deoxy-2'-fluoro
  misc_feature (9)..(9): 2'-O-methyl
  misc_feature (10)..(14): 2'-deoxy-2'-fluoro
  misc_feature (15)..(15): 2'-O-methyl
  misc_feature (16)..(19): 2'-deoxy-2'-fluoro
  misc_feature (20)..(20): Phosphorothioate 3'-Internucleotide Linkage
uuacaaguauucucauccctt

SEQ ID NO: 2099 - DNA, 21 bp, Artificial Sequence
  synthetic
  misc_feature (1)..(19): ribonucleotides
  misc_feature (1)..(2): 2'-deoxy-2'-fluoro
  misc_feature (3)..(3): 2'-O-methyl
  misc_feature (4)..(4): 2'-deoxy-2'-fluoro
  misc_feature (5)..(6): 2'-O-methyl
  misc_feature (7)..(8): 2'-deoxy-2'-fluoro
  misc_feature (9)..(11): 2'-O-methyl
  misc_feature (12)..(12): 2'-deoxy-2'-fluoro
  misc_feature (13)..(13): 2'-O-methyl
  misc_feature (14)..(14): 2'-deoxy-2'-fluoro
  misc_feature (15)..(19): 2'-O-methyl
  misc_feature (20)..(20): Phosphorothioate 3'-Internucleotide Linkage
uuguaguugaauacaggagtt

SEQ ID NO: 2100 - DNA, 21 bp, Artificial Sequence
  synthetic
  misc_feature (1)..(19): ribonucleotides
  misc_feature (1)..(1): 2'-O-methyl
  misc_feature (2)..(5): 2'-deoxy-2'-fluoro
  misc_feature (6)..(6): 2'-O-methyl
  misc_feature (7)..(10): 2'-deoxy-2'-fluoro
  misc_feature (9)..(9): 2'-deoxy-2'-fluoro
  misc_feature (11)..(13): 2'-O-methyl
  misc_feature (15)..(16): 2'-O-methyl
  misc_feature (17)..(17): 2'-deoxy-2'-fluoro
  misc_feature (18)..(19): 2'-O-methyl
  misc_feature (20)..(20): Phosphorothioate 3'-Internucleotide Linkage
auuucauccuaagugacggtt

SEQ ID NO: 2101 - DNA, 21 bp, Artificial Sequence
  synthetic
  misc_feature (1)..(19): ribonucleotides
  misc_feature (1)..(1): 5'-3 attached deoxy abasic moiety
  misc_feature (21)..(21): 3'-3 attached deoxy abasic moiety
ggcggaacaagcaguauautt

SEQ ID NO: 2102 - DNA, 21 bp, Artificial Sequence
  synthetic
  misc_feature (1)..(19): ribonucleotides
  misc_feature (1)..(1): 5'-3 attached deoxy abasic moiety
  misc_feature (21)..(21): 3'-3 attached deoxy abasic moiety
gcuggcggaacaagcaguatt

SEQ ID NO: 2103 - DNA, 21 bp, Artificial Sequence
  synthetic
  misc_feature (1)..(19): ribonucleotides
  misc_feature (1)..(1): 5'-3 attached deoxy abasic moiety
  misc_feature (21)..(21): 3'-3 attached deoxy abasic moiety
cggauggccaucaauuaautt

SEQ ID NO: 2104 - DNA, 21 bp, Artificial Sequence
  synthetic
  misc_feature (1)..(19): ribonucleotides
  misc_feature (1)..(1): 5'-3 attached deoxy abasic moiety
  misc_feature (21)..(21): 3'-3 attached deoxy abasic moiety
cgggacucuagcauacuuatt

SEQ ID NO: 2105 - DNA, 21 bp, Artificial Sequence
  synthetic
  misc_feature (1)..(19): ribonucleotides
  misc_feature (1)..(1): 5'-3 attached deoxy abasic moiety
  misc_feature (21)..(21): 3'-3 attached deoxy abasic moiety
cacccagauaauaaagcuutt

SEQ ID NO: 2106 - DNA, 21 bp, Artificial Sequence
  synthetic
  misc_feature (1)..(19): ribonucleotides
  misc_feature (1)..(1): 5'-3 attached deoxy abasic moiety
  misc_feature (21)..(21): 3'-3 attached deoxy abasic moiety
gggaugagaauacuuguaatt

SEQ ID NO: 2107 - DNA, 21 bp, Artificial Sequence
  synthetic
  misc_feature (1)..(19): ribonucleotides
  misc_feature (1)..(1): 5'-3 attached deoxy abasic moiety
  misc_feature (21)..(21): 3'-3 attached deoxy abasic moiety
cuccuguauucaacuacaatt

SEQ ID NO: 2108 - DNA, 21 bp, Artificial Sequence
  synthetic
  misc_feature (1)..(19): ribonucleotides
  misc_feature (1)..(1): 5'-3 attached deoxy abasic moiety
  misc_feature (21)..(21): 3'-3 attached deoxy abasic moiety
ccgucacuuaggaugaaautt

SEQ ID NO: 2109 - DNA, 21 bp, Artificial Sequence
  synthetic
  misc_feature (1)..(19): ribonucleotides
  misc_feature (20)..(20): Phosphorothioate 3'-Internucleotide Linkage
auauacugcuuguuccgcctt

SEQ ID NO: 2110 - DNA, 21 bp, Artificial Sequence
  synthetic
  misc_feature (1)..(19): ribonucleotides
  misc_feature (20)..(20): Phosphorothioate 3'-Internucleotide Linkage
uacugcuuguuccgccagctt

SEQ ID NO: 2111 - DNA, 21 bp, Artificial Sequence
  synthetic
  misc_feature (1)..(19): ribonucleotides
  misc_feature (20)..(20): Phosphorothioate 3'-Internucleotide Linkage
auuaauugauggccauccgtt

SEQ ID NO: 2112 - DNA, 21 bp, Artificial Sequence
  synthetic
  misc_feature (1)..(19): ribonucleotides
  misc_feature (20)..(20): Phosphorothioate 3'-Internucleotide Linkage
uaaguaugcuagagucccgtt

SEQ ID NO: 2113 - DNA, 21 bp, Artificial Sequence
  synthetic
  misc_feature (1)..(19): ribonucleotides
  misc_feature (20)..(20): Phosphorothioate 3'-Internucleotide Linkage
aagcuuuauuaucugggugtt

SEQ ID NO: 2114 - DNA, 21 bp, Artificial Sequence
  synthetic
  misc_feature (1)..(19): ribonucleotides
  misc_feature (20)..(20): Phosphorothioate 3'-Internucleotide Linkage
uuacaaguauucucauccctt

SEQ ID NO: 2115 - DNA, 21 bp, Artificial Sequence
  synthetic
  misc_feature (1)..(19): ribonucleotides
  misc_feature (20)..(20): Phosphorothioate 3'-Internucleotide Linkage
uuguaguugaauacaggagtt

SEQ ID NO: 2116 - DNA, 21 bp, Artificial Sequence
  synthetic
  misc_feature (1)..(19): ribonucleotides
  misc_feature (20)..(20): Phosphorothioate 3'-Internucleotide Linkage
auuucauccuaagugacggtt

SEQ ID NO: 2117 - DNA, 21 bp, Artificial Sequence
  synthetic
  misc_feature (1)..(19): ribonucleotides
  misc_feature (1)..(1): 2'-O-methyl
  misc_feature (2)..(2): 2'-deoxy-2'-fluoro
  misc_feature (3)..(3): 2'-O-methyl
  misc_feature (4)..(4): 2'-deoxy-2'-fluoro
  misc_feature (5)..(5): 2'-O-methyl
  misc_feature (6)..(7): 2'-deoxy-2'-fluoro
  misc_feature (8)..(8): 2'-O-methyl
  misc_feature (9)..(11): 2'-deoxy-2'-fluoro
  misc_feature (12)..(12): 2'-O-methyl
  misc_feature (13)..(16): 2'-deoxy-2'-fluoro
  misc_feature (17)..(17): 2'-O-methyl
  misc_feature (18)..(19): 2'-deoxy-2'-fluoro
  misc_feature (21)..(21): 3'-3 attached deoxy abasic moiety
auauacugcuuguuccgcctt

SEQ ID NO: 2118 - DNA, 21 bp, Artificial Sequence
  synthetic
  misc_feature (1)..(19): ribonucleotides
  misc_feature (1)..(1): 2'-deoxy-2'-fluoro
  misc_feature (2)..(2): 2'-O-methyl
  misc_feature (3)..(4): 2'-deoxy-2'-fluoro
  misc_feature (5)..(5): 2'-O-methyl
  misc_feature (6)..(8): 2'-deoxy-2'-fluoro
  misc_feature (9)..(9): 2'-O-methyl
  misc_feature (10)..(13): 2'-deoxy-2'-fluoro
  misc_feature (14)..(14): 2'-O-methyl
  misc_feature (15)..(16): 2'-deoxy-2'-fluoro
  misc_feature (17)..(18): 2'-O-methyl
  misc_feature (19)..(19): 2'-deoxy-2'-fluoro
  misc_feature (21)..(21): 3'-3 attached deoxy abasic moiety
uacugcuuguuccgccagctt

SEQ ID NO: 2119 - DNA, 21 bp, Artificial Sequence
  synthetic
  misc_feature (1)..(19): ribonucleotides
  misc_feature (1)..(1): 2'-O-methyl
  misc_feature (2)..(3): 2'-deoxy-2'-fluoro
  misc_feature (4)..(5): 2'-O-methyl
  misc_feature (6)..(7): 2'-deoxy-2'-fluoro
  misc_feature (8)..(9): 2'-O-methyl
  misc_feature (10)..(10): 2'-deoxy-2'-fluoro
  misc_feature (11)..(12): 2'-O-methyl
  misc_feature (13)..(14): 2'-deoxy-2'-fluoro
  misc_feature (15)..(15): 2'-O-methyl
  misc_feature (16)..(18): 2'-deoxy-2'-fluoro
  misc_feature (19)..(19): 2'-O-methyl
  misc_feature (21)..(21): 3ibonucleotides
auuaauugauggccauccgtt

SEQ ID NO: 2120 - DNA, 21 bp, Artificial Sequence
  synthetic
  misc_feature (1)..(19): ribonucleotides
  misc_feature (1)..(1): 2'-deoxy-2'-fluoro
  misc_feature (2)..(4): 2'-O-methyl
  misc_feature (5)..(5): 2'-deoxy-2'-fluoro
  misc_feature (6)..(6): 2'-O-methyl
  misc_feature (7)..(7): 2'-deoxy-2'-fluoro
  misc_feature (8)..(8): 2'-O-methyl
  misc_feature (9)..(10): 2'-deoxy-2'-fluoro
  misc_feature (11)..(14): 2'-O-methyl
  misc_feature (15)..(18): 2'-deoxy-2'-fluoro
  misc_feature (19)..(19): 2'-O-methyl
  misc_feature (21)..(21): 3'-3 attached deoxy abasic moiety
uaaguaugcuagagucccgtt

SEQ ID NO: 2121 - DNA, 21 bp, Artificial Sequence
  synthetic
  misc_feature (1)..(19): ribonucleotides
  misc_feature (1)..(3): 2'-O-methyl
  misc_feature (4)..(7): 2'-deoxy-2'-fluoro
  misc_feature (8)..(8): 2'-O-methyl
  misc_feature (9)..(10): 2'-deoxy-2'-fluoro
  misc_feature (11)..(11): 2'-O-methyl
  misc_feature (12)..(14): 2'-deoxy-2'-fluoro
  misc_feature (15)..(17): 2'-O-methyl
  misc_feature (18)..(18): 2'-deoxy-2'-fluoro
  misc_feature (19)..(19): 2'-O-methyl
  misc_feature (21)..(21): 3'-3 attached deoxy abasic moiety
aagcuuuauuaucugggugtt

SEQ ID NO: 2122 - DNA, 21 bp, Artificial Sequence
  synthetic
  misc_feature (1)..(19): ribonucleotides
  misc_feature (1)..(2): 2'-deoxy-2'-fluoro
  misc_feature (3)..(3): 2'-O-methyl
  misc_feature (4)..(4): 2'-deoxy-2'-fluoro
  misc_feature (5)..(7): 2'-O-methyl
  misc_feature (8)..(8): 2'-deoxy-2'-fluoro
  misc_feature (9)..(9): 2'-O-methyl
  misc_feature (10)..(14): 2'-deoxy-2'-fluoro
  misc_feature (15)..(15): 2'-O-methyl
  misc_feature (16)..(19): 2'-deoxy-2'-fluoro
  misc_feature (21)..(21): 3'-3 attached deoxy abasic moiety
uuacaaguauucucauccctt

SEQ ID NO: 2123 - DNA, 21 bp, Artificial Sequence
  synthetic
  misc_feature (1)..(19): ribonucleotides
  misc_feature (1)..(2): 2'-deoxy-2'-fluoro
  misc_feature (3)..(3): 2'-O-methyl
  misc_feature (4)..(4): 2'-deoxy-2'-fluoro
  misc_feature (5)..(6): 2'-O-methyl
  misc_feature (7)..(8): 2'-deoxy-2'-fluoro
  misc_feature (9)..(11): 2'-O-methyl
  misc_feature (12)..(12): 2'-deoxy-2'-fluoro
  misc_feature (13)..(13): 2'-O-methyl
  misc_feature (14)..(14): 2'-deoxy-2'-fluoro
  misc_feature (15)..(19): 2'-O-methyl
  misc_feature (21)..(21): 3'-3 attached deoxy abasic moiety
uuguaguugaauacaggagtt

SEQ ID NO: 2124 - DNA, 21 bp, Artificial Sequence
  synthetic
  misc_feature (1)..(19): ribonucleotides
  misc_feature (1)..(1): 2'-O-methyl
  misc_feature (2)..(5): 2'-deoxy-2'-fluoro
  misc_feature (6)..(6): 2'-O-methyl
  misc_feature (7)..(10): 2'-deoxy-2'-fluoro
  misc_feature (11)..(13): 2'-O-methyl
  misc_feature (14)..(14): 2'-deoxy-2'-fluoro
  misc_feature (15)..(16): 2'-O-methyl
  misc_feature (17)..(17): 2'-deoxy-2'-fluoro
  misc_feature (18)..(19): 2'-O-methyl
  misc_feature (21)..(21): 3'-3 attached deoxy abasic moiety
auuucauccuaagugacggtt

SEQ ID NO: 2125 - DNA, 21 bp, Artificial Sequence
  synthetic
  misc_feature (1)..(19): ribonucleotides
  misc_feature (21)..(21): 3'-3 attached deoxy abasic moiety
auauacugcuuguuccgcctt

SEQ ID NO: 2126 - DNA, 21 bp, Artificial Sequence
  synthetic
  misc_feature (1)..(19): ribonucleotides
  misc_feature (21)..(21): 3'-3 attached deoxy abasic moiety
uacugcuuguuccgccagctt

SEQ ID NO: 2127 - DNA, 21 bp, Artificial Sequence
  synthetic
  misc_feature (1)..(19): ribonucleotides
  misc_feature (21)..(21): 3'-3 attached deoxy abasic moiety
auuaauugauggccauccgtt

SEQ ID NO: 2128 - DNA, 21 bp, Artificial Sequence
  synthetic
  misc_feature (1)..(19): ribonucleotides
  misc_feature (21)..(21): 3'-3 attached deoxy abasic moiety
uaaguaugcuagagucccgtt

SEQ ID NO: 2129 - DNA, 21 bp, Artificial Sequence
  synthetic
  misc_feature (1)..(19): ribonucleotides
  misc_feature (21)..(21): 3'-3 attached deoxy abasic moiety
aagcuuuauuaucugggugtt

SEQ ID NO: 2130 - DNA, 21 bp, Artificial Sequence
  synthetic
  misc_feature (1)..(19): ribonucleotides
  misc_feature (21)..(21): 3'-3 attached deoxy abasic moiety
uuacaaguauucucauccctt

SEQ ID NO: 2131 - DNA, 21 bp, Artificial Sequence
  synthetic
  misc_feature (1)..(19): ribonucleotides
  misc_feature (21)..(21): 3'-3 attached deoxy abasic moiety
uuguaguugaauacaggagtt

SEQ ID NO: 2132 - DNA, 21 bp, Artificial Sequence
  synthetic
  misc_feature (1)..(19): ribonucleotides
  misc_feature (21)..(21): 3'-3 attached deoxy abasic moiety
auuucauccuaagugacggtt

SEQ ID NO: 2133 - DNA, 21 bp, Artificial Sequence
  synthetic
  misc_feature (1)..(19): ribonucleotides
  misc_feature (4)..(4): 2'-deoxy-2'-fluoro
  misc_feature (5)..(5): 2'-O-methyl
  misc_feature (6)..(7): 2'-deoxy-2'-fluoro
  misc_feature (8)..(8): 2'-O-methyl
  misc_feature (9)..(11): 2'-deoxy-2'-fluoro
  misc_feature (12)..(12): 2'-O-methyl
  misc_feature (13)..(16): 2'-deoxy-2'-fluoro
  misc_feature (17)..(17): 2'-O-methyl
  misc_feature (18)..(19): 2'-deoxy-2'-fluoro
  misc_feature (20)..(20): Phosphorothioate 3'-Internucleotide Linkage
auauacugcuuguuccgcctt

SEQ ID NO: 2134 - DNA, 21 bp, Artificial Sequence
  synthetic
  misc_feature (1)..(19): ribonucleotides
  misc_feature (4)..(4): 2'-deoxy-2'-fluoro
  misc_feature (5)..(5): 2'-O-methyl
  misc_feature (6)..(8): 2'-deoxy-2'-fluoro
  misc_feature (9)..(9): 2'-O-methyl
  misc_feature (10)..(13): 2'-deoxy-2'-fluoro
  misc_feature (14)..(14): 2'-O-methyl
  misc_feature (15)..(16): 2'-deoxy-2'-fluoro
  misc_feature (17)..(18): 2'-O-methyl
  misc_feature (19)..(19): 2'-deoxy-2'-fluoro
  misc_feature (20)..(20): Phosphorothioate 3'-Internucleotide Linkage
uacugcuuguuccgccagctt

SEQ ID NO: 2135 - DNA, 21 bp, Artificial Sequence
  synthetic
  misc_feature (1)..(19): ribonucleotides
  misc_feature (4)..(5): 2'-O-methyl
  misc_feature (6)..(7): 2'-deoxy-2'-fluoro
  misc_feature (8)..(9): 2'-O-methyl
  misc_feature (10)..(10): 2'-deoxy-2'-fluoro
  misc_feature (11)..(12): 2'-O-methyl
  misc_feature (13)..(14): 2'-deoxy-2'-fluoro
  misc_feature (15)..(15): 2'-O-methyl
  misc_feature (16)..(18): 2'-deoxy-2'-fluoro
  misc_feature (19)..(19): 2'-O-methyl
  misc_feature (20)..(20): Phosphorothioate 3'-Internucleotide Linkage
auuaauugauggccauccgtt

SEQ ID NO: 2136 - DNA, 21 bp, Artificial Sequence
  synthetic
  misc_feature (1)..(19): ribonucleotides
  misc_feature (4)..(4): 2'-O-methyl
  misc_feature (5)..(5): 2'-deoxy-2'-fluoro
  misc_feature (6)..(6): 2'-O-methyl
  misc_feature (7)..(7): 2'-deoxy-2'-fluoro
  misc_feature (8)..(8): 2'-O-methyl
  misc_feature (9)..(10): 2'-deoxy-2'-fluoro
  misc_feature (11)..(14): 2'-O-methyl
  misc_feature (15)..(18): 2'-deoxy-2'-fluoro
  misc_feature (19)..(19): 2'-O-methyl
  misc_feature (20)..(20): Phosphorothioate 3'-Internucleotide Linkage
uaaguaugcuagagucccgtt

SEQ ID NO: 2137 - DNA, 21 bp, Artificial Sequence
  synthetic
  misc_feature (1)..(19): ribonucleotides
  misc_feature (4)..(7): 2'-deoxy-2'-fluoro
  misc_feature (8)..(8): 2'-O-methyl
  misc_feature (9)..(10): 2'-deoxy-2'-fluoro
  misc_feature (11)..(11): 2'-O-methyl
  misc_feature (12)..(14): 2'-deoxy-2'-fluoro
  misc_feature (15)..(17): 2'-O-methyl
  misc_feature (18)..(18): 2'-deoxy-2'-fluoro
  misc_feature (19)..(19): 2'-O-methyl
  misc_feature (20)..(20): Phosphorothioate 3'-Internucleotide Linkage
aagcuuuauuaucugggugtt

SEQ ID NO: 2138 - DNA, 21 bp, Artificial Sequence
  synthetic
  misc_feature (1)..(19): ribonucleotides
  misc_feature (4)..(4): 2'-deoxy-2'-fluoro
  misc_feature (5)..(7): 2'-O-methyl
  misc_feature (8)..(8): 2'-deoxy-2'-fluoro
  misc_feature (9)..(9): 2'-O-methyl
  misc_feature (10)..(14): 2'-deoxy-2'-fluoro
  misc_feature (15)..(15): 2'-O-methyl
  misc_feature (16)..(19): 2'-deoxy-2'-fluoro
  misc_feature (20)..(20): Phosphorothioate 3'-Internucleotide Linkage
uuacaaguauucucauccctt

SEQ ID NO: 2139 - DNA, 21 bp, Artificial Sequence
  synthetic
  misc_feature (1)..(19): ribonucleotides
  misc_feature (4)..(4): 2'-deoxy-2'-fluoro
  misc_feature (5)..(6): 2'-O-methyl
  misc_feature (7)..(8): 2'-deoxy-2'-fluoro
  misc_feature (9)..(11): 2'-O-methyl
  misc_feature (12)..(12): 2'-deoxy-2'-fluoro
  misc_feature (13)..(13): 2'-O-methyl
  misc_feature (14)..(14): 2'-deoxy-2'-fluoro
  misc_feature (15)..(19): 2'-O-methyl
  misc_feature (20)..(20): Phosphorothioate 3'-Internucleotide Linkage
uuguaguugaauacaggagtt

SEQ ID NO: 2140 - DNA, 21 bp, Artificial Sequence
  synthetic
  misc_feature (1)..(19): ribonucleotides
  misc_feature (4)..(5): 2'-deoxy-2'-fluoro
  misc_feature (6)..(6): 2'-O-methyl
  misc_feature (7)..(10): 2'-deoxy-2'-fluoro
  misc_feature (11)..(13): 2'-O-methyl
  misc_feature (14)..(14): 2'-deoxy-2'-fluoro
  misc_feature (15)..(16): 2'-O-methyl
  misc_feature (17)..(17): 2'-deoxy-2'-fluoro
  misc_feature (18)..(19): 2'-O-methyl
  misc_feature (20)..(20): Phosphorothioate 3'-Internucleotide Linkage
auuucauccuaagugacggtt

SEQ ID NO: 2141 - RNA, 19 nt, Artificial Sequence
  synthetic
agcaggcaaaccauuugaa

SEQ ID NO: 2142 - RNA, 19 nt, Artificial Sequence
  synthetic
auuugaauggaugucaauc

SEQ ID NO: 2143 - RNA, 19 nt, Artificial Sequence
  synthetic
uuugaauggaugucaaucc

SEQ ID NO: 2144 - RNA, 19 nt, Artificial Sequence
  synthetic
uugaauggaugucaauccg

SEQ ID NO: 2145 - RNA, 19 nt, Artificial Sequence
  synthetic
ugaauggaugucaauccga

SEQ ID NO: 2146 - RNA, 19 nt, Artificial Sequence
  synthetic
gaauggaugucaauccgac

SEQ ID NO: 2147 - RNA, 19 nt, Artificial Sequence
  synthetic
auggaugucaauccgacuc

SEQ ID NO: 2148 - RNA, 19 nt, Artificial Sequence
  synthetic
uggaugucaauccgacucu

SEQ ID NO: 2149 - RNA, 19 nt, Artificial Sequence
  synthetic
ggaugucaauccgacucua

SEQ ID NO: 2150 - RNA, 19 nt, Artificial Sequence
  synthetic
gaugucaauccgacucuac

SEQ ID NO: 2151 - RNA, 19 nt, Artificial Sequence
  synthetic
augucaauccgacucuacu

SEQ ID NO: 2152 - RNA, 19 nt, Artificial Sequence
  synthetic
cuacuuuuccuaaagguuc

SEQ ID NO: 2153 - RNA, 19 nt, Artificial Sequence
  synthetic
uuccuaaagguuccagcgc

SEQ ID NO: 2154 - RNA, 19 nt, Artificial Sequence
  synthetic
uccuaaagguuccagcgca

SEQ ID NO: 2155 - RNA, 19 nt, Artificial Sequence
  synthetic
ccuaaagguuccagcgcaa

SEQ ID NO: 2156 - RNA, 19 nt, Artificial Sequence
  synthetic
cuaaagguuccagcgcaaa

SEQ ID NO: 2157 - RNA, 19 nt, Artificial Sequence
  synthetic
uaaagguuccagcgcaaaa

SEQ ID NO: 2158 - RNA, 19 nt, Artificial Sequence
  synthetic
aaagguuccagcgcaaaau

SEQ ID NO: 2159 - RNA, 19 nt, Artificial Sequence
  synthetic
aagguuccagcgcaaaaug

SEQ ID NO: 2160 - RNA, 19 nt, Artificial Sequence
  synthetic
agguuccagcgcaaaaugc

SEQ ID NO: 2161 - RNA, 19 nt, Artificial Sequence
  synthetic
gguuccagcgcaaaaugcc

SEQ ID NO: 2162 - RNA, 19 nt, Artificial Sequence
  synthetic
guuccagcgcaaaaugcca

SEQ ID NO: 2163 - RNA, 19 nt, Artificial Sequence
  synthetic
uuccagcgcaaaaugccau

SEQ ID NO: 2164 - RNA, 19 nt, Artificial Sequence
  synthetic
uccagcgcaaaaugccaua

SEQ ID NO: 2165 - RNA, 19 nt, Artificial Sequence
  synthetic
ccagcgcaaaaugccauaa

SEQ ID NO: 2166 - RNA, 19 nt, Artificial Sequence
  synthetic
cagcgcaaaaugccauaag

SEQ ID NO: 2167 - RNA, 19 nt, Artificial Sequence
  synthetic
agcgcaaaaugccauaagc

SEQ ID NO: 2168 - RNA, 19 nt, Artificial Sequence
  synthetic
gcgcaaaaugccauaagca

SEQ ID NO: 2169 - RNA, 19 nt, Artificial Sequence
  synthetic
cgcaaaaugccauaagcac

SEQ ID NO: 2170 - RNA, 19 nt, Artificial Sequence
  synthetic
gcaaaaugccauaagcacc

SEQ ID NO: 2171 - RNA, 19 nt, Artificial Sequence
  synthetic
caaaaugccauaagcacca

SEQ ID NO: 2172 - RNA, 19 nt, Artificial Sequence
  synthetic
aaaaugccauaagcaccac

SEQ ID NO: 2173 - RNA, 19 nt, Artificial Sequence
  synthetic
aaaugccauaagcaccaca

SEQ ID NO: 2174 - RNA, 19 nt, Artificial Sequence
  synthetic
aaugccauaagcaccacau

SEQ ID NO: 2175 - RNA, 19 nt, Artificial Sequence
  synthetic
augccauaagcaccacauu

SEQ ID NO: 2176 - RNA, 19 nt, Artificial Sequence
  synthetic
ugccauaagcaccacauuc

SEQ ID NO: 2177 - RNA, 19 nt, Artificial Sequence
  synthetic
gccauaagcaccacauucc

SEQ ID NO: 2178 - RNA, 19 nt, Artificial Sequence
  synthetic
ccauaagcaccacauuccc

SEQ ID NO: 2179 - RNA, 19 nt, Artificial Sequence
  synthetic
cauaagcaccacauucccu

SEQ ID NO: 2180 - RNA, 19 nt, Artificial Sequence
  synthetic
auaagcaccacauucccuu

SEQ ID NO: 2181 - RNA, 19 nt, Artificial Sequence
  synthetic
uaagcaccacauucccuua

SEQ ID NO: 2182 - RNA, 19 nt, Artificial Sequence
  synthetic
aagcaccacauucccuuau

SEQ ID NO: 2183 - RNA, 19 nt, Artificial Sequence
  synthetic
agcaccacauucccuuaua

SEQ ID NO: 2184 - RNA, 19 nt, Artificial Sequence
  synthetic
gcaccacauucccuuauac

SEQ ID NO: 2185 - RNA, 19 nt, Artificial Sequence
  synthetic
caccacauucccuuauacu

SEQ ID NO: 2186 - RNA, 19 nt, Artificial Sequence
  synthetic
accacauucccuuauacug

SEQ ID NO: 2187 - RNA, 19 nt, Artificial Sequence
  synthetic
ccacauucccuuauacugg

SEQ ID NO: 2188 - RNA, 19 nt, Artificial Sequence
  synthetic
cacauucccuuauacugga

SEQ ID NO: 2189 - RNA, 19 nt, Artificial Sequence
  synthetic
acauucccuuauacuggag

SEQ ID NO: 2190 - RNA, 19 nt, Artificial Sequence
  synthetic
cauucccuuauacuggaga

SEQ ID NO: 2191 - RNA, 19 nt, Artificial Sequence
  synthetic
auucccuuauacuggagau

SEQ ID NO: 2192 - RNA, 19 nt, Artificial Sequence
  synthetic
uucccuuauacuggagauc

SEQ ID NO: 2193 - RNA, 19 nt, Artificial Sequence
  synthetic
ucccuuauacuggagaucc

SEQ ID NO: 2194 - RNA, 19 nt, Artificial Sequence
  synthetic
cccuuauacuggagauccu

SEQ ID NO: 2195 - RNA, 19 nt, Artificial Sequence
  synthetic
ccuuauacuggagauccuc

SEQ ID NO: 2196 - RNA, 19 nt, Artificial Sequence
  synthetic
cuuauacuggagauccucc

SEQ ID NO: 2197 - RNA, 19 nt, Artificial Sequence
  synthetic
uuauacuggagauccucca

SEQ ID NO: 2198 - RNA, 19 nt, Artificial Sequence
  synthetic
uauacuggagauccuccau

SEQ ID NO: 2199 - RNA, 19 nt, Artificial Sequence
  synthetic
auacuggagauccuccaua

SEQ ID NO: 2200 - RNA, 19 nt, Artificial Sequence
  synthetic
uacuggagauccuccauac

SEQ ID NO: 2201 - RNA, 19 nt, Artificial Sequence
  synthetic
acuggagauccuccauaca

SEQ ID NO: 2202 - RNA, 19 nt, Artificial Sequence
  synthetic
cuggagauccuccauacag

SEQ ID NO: 2203 - RNA, 19 nt, Artificial Sequence
  synthetic
uggagauccuccauacagc

SEQ ID NO: 2204 - RNA, 19 nt, Artificial Sequence
  synthetic
ggagauccuccauacagcc

SEQ ID NO: 2205 - RNA, 19 nt, Artificial Sequence
  synthetic
gagauccuccauacagcca

SEQ ID NO: 2206 - RNA, 19 nt, Artificial Sequence
  synthetic
agauccuccauacagccau

SEQ ID NO: 2207 - RNA, 19 nt, Artificial Sequence
  synthetic
gauccuccauacagccaug

SEQ ID NO: 2208 - RNA, 19 nt, Artificial Sequence
  synthetic
auccuccauacagccaugg

SEQ ID NO: 2209 - RNA, 19 nt, Artificial Sequence
  synthetic
uccuccauacagccaugga

SEQ ID NO: 2210 - RNA, 19 nt, Artificial Sequence
  synthetic
ccuccauacagccauggaa

SEQ ID NO: 2211 - RNA, 19 nt, Artificial Sequence
  synthetic
cuccauacagccauggaac

SEQ ID NO: 2212 - RNA, 19 nt, Artificial Sequence
  synthetic
uccauacagccauggaaca

SEQ ID NO: 2213 - RNA, 19 nt, Artificial Sequence
  synthetic
ccauacagccauggaacag

SEQ ID NO: 2214 - RNA, 19 nt, Artificial Sequence
  synthetic
cauacagccauggaacagg

SEQ ID NO: 2215 - RNA, 19 nt, Artificial Sequence
  synthetic
auacagccauggaacagga

SEQ ID NO: 2216 - RNA, 19 nt, Artificial Sequence
  synthetic
uacagccauggaacaggaa

SEQ ID NO: 2217 - RNA, 19 nt, Artificial Sequence
  synthetic
acagccauggaacaggaac

SEQ ID NO: 2218 - RNA, 19 nt, Artificial Sequence
  synthetic
cagccauggaacaggaaca

SEQ ID NO: 2219 - RNA, 19 nt, Artificial Sequence
  synthetic
agccauggaacaggaacag

SEQ ID NO: 2220 - RNA, 19 nt, Artificial Sequence
  synthetic
gccauggaacaggaacagg

SEQ ID NO: 2221 - RNA, 19 nt, Artificial Sequence
  synthetic
acaggaacaggguacacca

SEQ ID NO: 2222 - RNA, 19 nt, Artificial Sequence
  synthetic
caggaacaggguacaccau

SEQ ID NO: 2223 - RNA, 19 nt, Artificial Sequence
  synthetic
aggaacaggguacaccaug

SEQ ID NO: 2224 - RNA, 19 nt, Artificial Sequence
  synthetic
ggaacaggguacaccaugg

SEQ ID NO: 2225 - RNA, 19 nt, Artificial Sequence
  synthetic
gaacaggguacaccaugga

SEQ ID NO: 2226 - RNA, 19 nt, Artificial Sequence
  synthetic
aacaggguacaccauggac

SEQ ID NO: 2227 - RNA, 19 nt, Artificial Sequence
  synthetic
acaggguacaccauggaca

SEQ ID NO: 2228 - RNA, 19 nt, Artificial Sequence
  synthetic
caggguacaccauggacac

SEQ ID NO: 2229 - RNA, 19 nt, Artificial Sequence
  synthetic
aggguacaccauggacaca

SEQ ID NO: 2230 - RNA, 19 nt, Artificial Sequence
  synthetic
ggguacaccauggacacag

SEQ ID NO: 2231 - RNA, 19 nt, Artificial Sequence
  synthetic
gguacaccauggacacagu

SEQ ID NO: 2232 - RNA, 19 nt, Artificial Sequence
  synthetic
uacaccauggacacaguca

SEQ ID NO: 2233 - RNA, 19 nt, Artificial Sequence
  synthetic
acaccauggacacagucaa

SEQ ID NO: 2234 - RNA, 19 nt, Artificial Sequence
  synthetic
caccauggacacagucaac

SEQ ID NO: 2235 - RNA, 19 nt, Artificial Sequence
  synthetic
accauggacacagucaaca

SEQ ID NO: 2236 - RNA, 19 nt, Artificial Sequence
  synthetic
ccauggacacagucaacag

SEQ ID NO: 2237 - RNA, 19 nt, Artificial Sequence
  synthetic
cauggacacagucaacaga

SEQ ID NO: 2238 - RNA, 19 nt, Artificial Sequence
  synthetic
auggacacagucaacagaa

SEQ ID NO: 2239 - RNA, 19 nt, Artificial Sequence
  synthetic
uggacacagucaacagaac

SEQ ID NO: 2240 - RNA, 19 nt, Artificial Sequence
  synthetic
ggacacagucaacagaaca

SEQ ID NO: 2241 - RNA, 19 nt, Artificial Sequence
  synthetic
gacacagucaacagaacac

SEQ ID NO: 2242 - RNA, 19 nt, Artificial Sequence
  synthetic
acacagucaacagaacaca

SEQ ID NO: 2243 - RNA, 19 nt, Artificial Sequence
  synthetic
cacagucaacagaacacac

SEQ ID NO: 2244 - RNA, 19 nt, Artificial Sequence
  synthetic
acagucaacagaacacacc

SEQ ID NO: 2245 - RNA, 19 nt, Artificial Sequence
  synthetic
cagucaacagaacacacca

SEQ ID NO: 2246 - RNA, 19 nt, Artificial Sequence
  synthetic
agucaacagaacacaccaa

SEQ ID NO: 2247 - RNA, 19 nt, Artificial Sequence
  synthetic
gucaacagaacacaccaau

SEQ ID NO: 2248 - RNA, 19 nt, Artificial Sequence
  synthetic
ucaacagaacacaccaaua

SEQ ID NO: 2249 - RNA, 19 nt, Artificial Sequence
  synthetic
caacagaacacaccaauau

SEQ ID NO: 2250 - RNA, 19 nt, Artificial Sequence
  synthetic
aacagaacacaccaauauu

SEQ ID NO: 2251 - RNA, 19 nt, Artificial Sequence
  synthetic
acagaacacaccaauauuc

SEQ ID NO: 2252 - RNA, 19 nt, Artificial Sequence
  synthetic
cagaacacaccaauauuca

SEQ ID NO: 2253 - RNA, 19 nt, Artificial Sequence
  synthetic
agaacacaccaauauucag

SEQ ID NO: 2254 - RNA, 19 nt, Artificial Sequence
  synthetic
gaacacaccaauauucaga

SEQ ID NO: 2255 - RNA, 19 nt, Artificial Sequence
  synthetic
uauucagaaaaggggaagu

SEQ ID NO: 2256 - RNA, 19 nt, Artificial Sequence
  synthetic
uggacgacaaauacagaaa

SEQ ID NO: 2257 - RNA, 19 nt, Artificial Sequence
  synthetic
acaaauacagaaacugggg

SEQ ID NO: 2258 - RNA, 19 nt, Artificial Sequence
  synthetic
caaauacagaaacuggggc

SEQ ID NO: 2259 - RNA, 19 nt, Artificial Sequence
  synthetic
aaauacagaaacuggggca

SEQ ID NO: 2260 - RNA, 19 nt, Artificial Sequence
  synthetic
aauacagaaacuggggcac

SEQ ID NO: 2261 - RNA, 19 nt, Artificial Sequence
  synthetic
auacagaaacuggggcacc

SEQ ID NO: 2262 - RNA, 19 nt, Artificial Sequence
  synthetic
uacagaaacuggggcaccc

SEQ ID NO: 2263 - RNA, 19 nt, Artificial Sequence
  synthetic
acagaaacuggggcacccc

SEQ ID NO: 2264 - RNA, 19 nt, Artificial Sequence
  synthetic
cagaaacuggggcacccca

SEQ ID NO: 2265 - RNA, 19 nt, Artificial Sequence
  synthetic
agaaacuggggcaccccaa

SEQ ID NO: 2266 - RNA, 19 nt, Artificial Sequence
  synthetic
gaaacuggggcaccccaac

SEQ ID NO: 2267 - RNA, 19 nt, Artificial Sequence
  synthetic
aaacuggggcaccccaacu

SEQ ID NO: 2268 - RNA, 19 nt, Artificial Sequence
  synthetic
aacuggggcaccccaacuc

SEQ ID NO: 2269 - RNA, 19 nt, Artificial Sequence
  synthetic
acuggggcaccccaacuca

SEQ ID NO: 2270 - RNA, 19 nt, Artificial Sequence
  synthetic
cuggggcaccccaacucaa

SEQ ID NO: 2271 - RNA, 19 nt, Artificial Sequence
  synthetic
uggggcaccccaacucaac

SEQ ID NO: 2272 - RNA, 19 nt, Artificial Sequence
  synthetic
ggggcaccccaacucaacc

SEQ ID NO: 2273 - RNA, 19 nt, Artificial Sequence
  synthetic
gggcaccccaacucaaccc

SEQ ID NO: 2274 - RNA, 19 nt, Artificial Sequence
  synthetic
ggcaccccaacucaaccca

SEQ ID NO: 2275 - RNA, 19 nt, Artificial Sequence
  synthetic
gcaccccaacucaacccaa

SEQ ID NO: 2276 - RNA, 19 nt, Artificial Sequence
  synthetic
caccccaacucaacccaau

SEQ ID NO: 2277 - RNA, 19 nt, Artificial Sequence
  synthetic
accccaacucaacccaauu

SEQ ID NO: 2278 - RNA, 19 nt, Artificial Sequence
  synthetic
ccccaacucaacccaauug

SEQ ID NO: 2279 - RNA, 19 nt, Artificial Sequence
  synthetic
cccaacucaacccaauuga

SEQ ID NO: 2280 - RNA, 19 nt, Artificial Sequence
  synthetic
ccaacucaacccaauugau

SEQ ID NO: 2281 - RNA, 19 nt, Artificial Sequence
  synthetic
caacucaacccaauugaug

SEQ ID NO: 2282 - RNA, 19 nt, Artificial Sequence
  synthetic
aacucaacccaauugaugg

SEQ ID NO: 2283 - RNA, 19 nt, Artificial Sequence
  synthetic
acucaacccaauugaugga

SEQ ID NO: 2284 - RNA, 19 nt, Artificial Sequence
  synthetic
cucaacccaauugauggac

SEQ ID NO: 2285 - RNA, 19 nt, Artificial Sequence
  synthetic
ucaacccaauugauggacc

SEQ ID NO: 2286 - RNA, 19 nt, Artificial Sequence
  synthetic
caacccaauugauggacca

SEQ ID NO: 2287 - RNA, 19 nt, Artificial Sequence
  synthetic
aacccaauugauggaccac

SEQ ID NO: 2288 - RNA, 19 nt, Artificial Sequence
  synthetic
acccaauugauggaccacu

SEQ ID NO: 2289 - RNA, 19 nt, Artificial Sequence
  synthetic
cccaauugauggaccacua

SEQ ID NO: 2290 - RNA, 19 nt, Artificial Sequence
  synthetic
ccaauugauggaccacuac

SEQ ID NO: 2291 - RNA, 19 nt, Artificial Sequence
  synthetic
caauugauggaccacuacc

SEQ ID NO: 2292 - RNA, 19 nt, Artificial Sequence
  synthetic
aauugauggaccacuaccu

SEQ ID NO: 2293 - RNA, 19 nt, Artificial Sequence
  synthetic
auugauggaccacuaccug

SEQ ID NO: 2294 - RNA, 19 nt, Artificial Sequence
  synthetic
uugauggaccacuaccuga

SEQ ID NO: 2295 - RNA, 19 nt, Artificial Sequence
  synthetic
ugauggaccacuaccugag

SEQ ID NO: 2296 - RNA, 19 nt, Artificial Sequence
  synthetic
gauggaccacuaccugagg

SEQ ID NO: 2297 - RNA, 19 nt, Artificial Sequence
  synthetic
auggaccacuaccugagga

SEQ ID NO: 2298 - RNA, 19 nt, Artificial Sequence
  synthetic
uggaccacuaccugaggau

SEQ ID NO: 2299 - RNA, 19 nt, Artificial Sequence
  synthetic
ggaccacuaccugaggaua

SEQ ID NO: 2300 - RNA, 19 nt, Artificial Sequence
  synthetic
gaccacuaccugaggauaa

SEQ ID NO: 2301 - RNA, 19 nt, Artificial Sequence
  synthetic
accacuaccugaggauaau

SEQ ID NO: 2302 - RNA, 19 nt, Artificial Sequence
  synthetic
ccacuaccugaggauaaug

SEQ ID NO: 2303 - RNA, 19 nt, Artificial Sequence
  synthetic
cacuaccugaggauaauga

SEQ ID NO: 2304 - RNA, 19 nt, Artificial Sequence
  synthetic
acuaccugaggauaaugag

SEQ ID NO: 2305 - RNA, 19 nt, Artificial Sequence
  synthetic
cuaccugaggauaaugagc

SEQ ID NO: 2306 - RNA, 19 nt, Artificial Sequence
  synthetic
uaccugaggauaaugagcc

SEQ ID NO: 2307 - RNA, 19 nt, Artificial Sequence
  synthetic
accugaggauaaugagcca

SEQ ID NO: 2308 - RNA, 19 nt, Artificial Sequence
  synthetic
ccugaggauaaugagccaa

SEQ ID NO: 2309 - RNA, 19 nt, Artificial Sequence
  synthetic
cugaggauaaugagccaag

SEQ ID NO: 2310 - RNA, 19 nt, Artificial Sequence
  synthetic
ugaggauaaugagccaagu

SEQ ID NO: 2311 - RNA, 19 nt, Artificial Sequence
  synthetic
gaggauaaugagccaagug

SEQ ID NO: 2312 - RNA, 19 nt, Artificial Sequence
  synthetic
aggauaaugagccaagugg

SEQ ID NO: 2313 - RNA, 19 nt, Artificial Sequence
  synthetic
ggauaaugagccaagugga

SEQ ID NO: 2314 - RNA, 19 nt, Artificial Sequence
  synthetic
gauaaugagccaaguggau

SEQ ID NO: 2315 - RNA, 19 nt, Artificial Sequence
  synthetic
auaaugagccaaguggaua

SEQ ID NO: 2316 - RNA, 19 nt, Artificial Sequence
  synthetic
uaaugagccaaguggauau

SEQ ID NO: 2317 - RNA, 19 nt, Artificial Sequence
  synthetic
aaugagccaaguggauaug

SEQ ID NO: 2318 - RNA, 19 nt, Artificial Sequence
  synthetic
augagccaaguggauaugc

SEQ ID NO: 2319 - RNA, 19 nt, Artificial Sequence
  synthetic
ugagccaaguggauaugca

SEQ ID NO: 2320 - RNA, 19 nt, Artificial Sequence
  synthetic
gagccaaguggauaugcac

SEQ ID NO: 2321 - RNA, 19 nt, Artificial Sequence
  synthetic
agccaaguggauaugcaca

SEQ ID NO: 2322 - RNA, 19 nt, Artificial Sequence
  synthetic
gccaaguggauaugcacaa

SEQ ID NO: 2323 - RNA, 19 nt, Artificial Sequence
  synthetic
ccaaguggauaugcacaaa

SEQ ID NO: 2324 - RNA, 19 nt, Artificial Sequence
  synthetic
caaguggauaugcacaaac

SEQ ID NO: 2325 - RNA, 19 nt, Artificial Sequence
  synthetic
aaguggauaugcacaaaca

SEQ ID NO: 2326 - RNA, 19 nt, Artificial Sequence
  synthetic
aguggauaugcacaaacag

SEQ ID NO: 2327 - RNA, 19 nt, Artificial Sequence
  synthetic
guggauaugcacaaacaga

SEQ ID NO: 2328 - RNA, 19 nt, Artificial Sequence
  synthetic
uggauaugcacaaacagac

SEQ ID NO: 2329 - RNA, 19 nt, Artificial Sequence
  synthetic
ggauaugcacaaacagacu

SEQ ID NO: 2330 - RNA, 19 nt, Artificial Sequence
  synthetic
gauaugcacaaacagacug

SEQ ID NO: 2331 - RNA, 19 nt, Artificial Sequence
  synthetic
auaugcacaaacagacugu

SEQ ID NO: 2332 - RNA, 19 nt, Artificial Sequence
  synthetic
uaugcacaaacagacugug

SEQ ID NO: 2333 - RNA, 19 nt, Artificial Sequence
  synthetic
augcacaaacagacugugu

SEQ ID NO: 2334 - RNA, 19 nt, Artificial Sequence
  synthetic
ugcacaaacagacuguguc

SEQ ID NO: 2335 - RNA, 19 nt, Artificial Sequence
  synthetic
gcacaaacagacugugucc

SEQ ID NO: 2336 - RNA, 19 nt, Artificial Sequence
  synthetic
cacaaacagacuguguccu

SEQ ID NO: 2337 - RNA, 19 nt, Artificial Sequence
  synthetic
acaaacagacuguguccug

SEQ ID NO: 2338 - RNA, 19 nt, Artificial Sequence
  synthetic
caaacagacuguguccugg

SEQ ID NO: 2339 - RNA, 19 nt, Artificial Sequence
  synthetic
aaacagacuguguccugga

SEQ ID NO: 2340 - RNA, 19 nt, Artificial Sequence
  synthetic
aacagacuguguccuggag

SEQ ID NO: 2341 - RNA, 19 nt, Artificial Sequence
  synthetic
acagacuguguccuggagg

SEQ ID NO: 2342 - RNA, 19 nt, Artificial Sequence
  synthetic
cagacuguguccuggaggc

SEQ ID NO: 2343 - RNA, 19 nt, Artificial Sequence
  synthetic
agacuguguccuggaggcu

SEQ ID NO: 2344 - RNA, 19 nt, Artificial Sequence
  synthetic
gacuguguccuggaggcua

SEQ ID NO: 2345 - RNA, 19 nt, Artificial Sequence
  synthetic
acuguguccuggaggcuau

SEQ ID NO: 2346 - RNA, 19 nt, Artificial Sequence
  synthetic
cuguguccuggaggcuaug

SEQ ID NO: 2347 - RNA, 19 nt, Artificial Sequence
  synthetic
uguguccuggaggcuaugg

SEQ ID NO: 2348 - RNA, 19 nt, Artificial Sequence
  synthetic
guguccuggaggcuauggc

SEQ ID NO: 2349 - RNA, 19 nt, Artificial Sequence
  synthetic
uguccuggaggcuauggcc

SEQ ID NO: 2350 - RNA, 19 nt, Artificial Sequence
  synthetic
guccuggaggcuauggccu

SEQ ID NO: 2351 - RNA, 19 nt, Artificial Sequence
  synthetic
uccuggaggcuauggccuu

SEQ ID NO: 2352 - RNA, 19 nt, Artificial Sequence
  synthetic
ccuggaggcuauggccuuc

SEQ ID NO: 2353 - RNA, 19 nt, Artificial Sequence
  synthetic
cuggaggcuauggccuucc

SEQ ID NO: 2354 - RNA, 19 nt, Artificial Sequence
  synthetic
uggaggcuauggccuuccu

SEQ ID NO: 2355 - RNA, 19 nt, Artificial Sequence
  synthetic
ggaggcuauggccuuccuu

SEQ ID NO: 2356 - RNA, 19 nt, Artificial Sequence
  synthetic
gaggcuauggccuuccuug

SEQ ID NO: 2357 - RNA, 19 nt, Artificial Sequence
  synthetic
aggcuauggccuuccuuga

SEQ ID NO: 2358 - RNA, 19 nt, Artificial Sequence
  synthetic
ggcuauggccuuccuugaa

SEQ ID NO: 2359 - RNA, 19 nt, Artificial Sequence
  synthetic
gcuauggccuuccuugaag

SEQ ID NO: 2360 - RNA, 19 nt, Artificial Sequence
  synthetic
cuauggccuuccuugaaga

SEQ ID NO: 2361 - RNA, 19 nt, Artificial Sequence
  synthetic
uauggccuuccuugaagaa

SEQ ID NO: 2362 - RNA, 19 nt, Artificial Sequence
  synthetic
auggccuuccuugaagaau

SEQ ID NO: 2363 - RNA, 19 nt, Artificial Sequence
  synthetic
uggccuuccuugaagaauc

SEQ ID NO: 2364 - RNA, 19 nt, Artificial Sequence
  synthetic
ggccuuccuugaagaaucc

SEQ ID NO: 2365 - RNA, 19 nt, Artificial Sequence
  synthetic
gccuuccuugaagaauccc

SEQ ID NO: 2366 - RNA, 19 nt, Artificial Sequence
  synthetic
ccuuccuugaagaauccca

SEQ ID NO: 2367 - RNA, 19 nt, Artificial Sequence
  synthetic
cuuccuugaagaaucccac

SEQ ID NO: 2368 - RNA, 19 nt, Artificial Sequence
  synthetic
uuccuugaagaaucccacc

SEQ ID NO: 2369 - RNA, 19 nt, Artificial Sequence
  synthetic
uccuugaagaaucccaccc

SEQ ID NO: 2370 - RNA, 19 nt, Artificial Sequence
  synthetic
ccuugaagaaucccaccca

SEQ ID NO: 2371 - RNA, 19 nt, Artificial Sequence
  synthetic
cuugaagaaucccacccag

SEQ ID NO: 2372 - RNA, 19 nt, Artificial Sequence
  synthetic
uugaagaaucccacccagg

SEQ ID NO: 2373 - RNA, 19 nt, Artificial Sequence
  synthetic
gaaucccacccagggaucu

SEQ ID NO: 2374 - RNA, 19 nt, Artificial Sequence
  synthetic
aucuuugagaacucaugcc

SEQ ID NO: 2375 - RNA, 19 nt, Artificial Sequence
  synthetic
ucuuugagaacucaugccu

SEQ ID NO: 2376 - RNA, 19 nt, Artificial Sequence
  synthetic
cuuugagaacucaugccuu

SEQ ID NO: 2377 - RNA, 19 nt, Artificial Sequence
  synthetic
uuugagaacucaugccuug

SEQ ID NO: 2378 - RNA, 19 nt, Artificial Sequence
  synthetic
uugagaacucaugccuuga

SEQ ID NO: 2379 - RNA, 19 nt, Artificial Sequence
  synthetic
ugagaacucaugccuugaa

SEQ ID NO: 2380 - RNA, 19 nt, Artificial Sequence
  synthetic
gagaacucaugccuugaaa

SEQ ID NO: 2381 - RNA, 19 nt, Artificial Sequence
  synthetic
agaacucaugccuugaaac

SEQ ID NO: 2382 - RNA, 19 nt, Artificial Sequence
  synthetic
gaacucaugccuugaaaca

SEQ ID NO: 2383 - RNA, 19 nt, Artificial Sequence
  synthetic
aacucaugccuugaaacaa

SEQ ID NO: 2384 - RNA, 19 nt, Artificial Sequence
  synthetic
acucaugccuugaaacaau

SEQ ID NO: 2385 - RNA, 19 nt, Artificial Sequence
  synthetic
cucaugccuugaaacaaug

SEQ ID NO: 2386 - RNA, 19 nt, Artificial Sequence
  synthetic
ucaugccuugaaacaaugg

SEQ ID NO: 2387 - RNA, 19 nt, Artificial Sequence
  synthetic
caugccuugaaacaaugga

SEQ ID NO: 2388 - RNA, 19 nt, Artificial Sequence
  synthetic
augccuugaaacaauggaa

SEQ ID NO: 2389 - RNA, 19 nt, Artificial Sequence
  synthetic
ugccuugaaacaauggaag

SEQ ID NO: 2390 - RNA, 19 nt, Artificial Sequence
  synthetic
gccuugaaacaauggaagu

SEQ ID NO: 2391 - RNA, 19 nt, Artificial Sequence
  synthetic
gaaacaauggaagucguuc

SEQ ID NO: 2392 - RNA, 19 nt, Artificial Sequence
  synthetic
caacaaacaaggguggaca

SEQ ID NO: 2393 - RNA, 19 nt, Artificial Sequence
  synthetic
caaacaaggguggacaaac

SEQ ID NO: 2394 - RNA, 19 nt, Artificial Sequence
  synthetic
aaacaaggguggacaaacu

SEQ ID NO: 2395 - RNA, 19 nt, Artificial Sequence
  synthetic
aaacuaacucaaggucgcc

SEQ ID NO: 2396 - RNA, 19 nt, Artificial Sequence
  synthetic
cgccagacuuaugauugga

SEQ ID NO: 2397 - RNA, 19 nt, Artificial Sequence
  synthetic
gccagacuuaugauuggac

SEQ ID NO: 2398 - RNA, 19 nt, Artificial Sequence
  synthetic
ccagacuuaugauuggaca

SEQ ID NO: 2399 - RNA, 19 nt, Artificial Sequence
  synthetic
cagacuuaugauuggacau

SEQ ID NO: 2400 - RNA, 19 nt, Artificial Sequence
  synthetic
agacuuaugauuggacauu

SEQ ID NO: 2401 - RNA, 19 nt, Artificial Sequence
  synthetic
gacuuaugauuggacauua

SEQ ID NO: 2402 - RNA, 19 nt, Artificial Sequence
  synthetic
acuuaugauuggacauuaa

SEQ ID NO: 2403 - RNA, 19 nt, Artificial Sequence
  synthetic
cuuaugauuggacauuaaa

SEQ ID NO: 2404 - RNA, 19 nt, Artificial Sequence
  synthetic
uuaaacagaaaucaaccgg

SEQ ID NO: 2405 - RNA, 19 nt, Artificial Sequence
  synthetic
gcagcaacugcauuagcca

SEQ ID NO: 2406 - RNA, 19 nt, Artificial Sequence
  synthetic
uuagccaacaccauagaag

SEQ ID NO: 2407 - RNA, 19 nt, Artificial Sequence
  synthetic
uagccaacaccauagaagu

SEQ ID NO: 2408 - RNA, 19 nt, Artificial Sequence
  synthetic
agccaacaccauagaaguu

SEQ ID NO: 2409 - RNA, 19 nt, Artificial Sequence
  synthetic
gccaacaccauagaaguuu

SEQ ID NO: 2410 - RNA, 19 nt, Artificial Sequence
  synthetic
ccaacaccauagaaguuuu

SEQ ID NO: 2411 - RNA, 19 nt, Artificial Sequence
  synthetic
caacaccauagaaguuuuu

SEQ ID NO: 2412 - RNA, 19 nt, Artificial Sequence
  synthetic
aacaccauagaaguuuuua

SEQ ID NO: 2413 - RNA, 19 nt, Artificial Sequence
  synthetic
acaccauagaaguuuuuag

SEQ ID NO: 2414 - RNA, 19 nt, Artificial Sequence
  synthetic
caccauagaaguuuuuaga

SEQ ID NO: 2415 - RNA, 19 nt, Artificial Sequence
  synthetic
accauagaaguuuuuagau

SEQ ID NO: 2416 - RNA, 19 nt, Artificial Sequence
  synthetic
ccauagaaguuuuuagauc

SEQ ID NO: 2417 - RNA, 19 nt, Artificial Sequence
  synthetic
cauagaaguuuuuagaucg

SEQ ID NO: 2418 - RNA, 19 nt, Artificial Sequence
  synthetic
auagaaguuuuuagaucga

SEQ ID NO: 2419 - RNA, 19 nt, Artificial Sequence
  synthetic
uagaaguuuuuagaucgaa

SEQ ID NO: 2420 - RNA, 19 nt, Artificial Sequence
  synthetic
agaaguuuuuagaucgaau

SEQ ID NO: 2421 - RNA, 19 nt, Artificial Sequence
  synthetic
gaaguuuuuagaucgaaug

SEQ ID NO: 2422 - RNA, 19 nt, Artificial Sequence
  synthetic
aaguuuuuagaucgaaugg

SEQ ID NO: 2423 - RNA, 19 nt, Artificial Sequence
  synthetic
agaucgaauggucuaacag

SEQ ID NO: 2424 - RNA, 19 nt, Artificial Sequence
  synthetic
gcuaaugaaucgggaaggc

SEQ ID NO: 2425 - RNA, 19 nt, Artificial Sequence
  synthetic
ggaaggcuaauagauuucc

SEQ ID NO: 2426 - RNA, 19 nt, Artificial Sequence
  synthetic
gaaggcuaauagauuuccu

SEQ ID NO: 2427 - RNA, 19 nt, Artificial Sequence
  synthetic
aaggcuaauagauuuccuc

SEQ ID NO: 2428 - RNA, 19 nt, Artificial Sequence
  synthetic
aggcuaauagauuuccuca

SEQ ID NO: 2429 - RNA, 19 nt, Artificial Sequence
  synthetic
ggcuaauagauuuccucaa

SEQ ID NO: 2430 - RNA, 19 nt, Artificial Sequence
  synthetic
gcuaauagauuuccucaag

SEQ ID NO: 2431 - RNA, 19 nt, Artificial Sequence
  synthetic
cuaauagauuuccucaagg

SEQ ID NO: 2432 - RNA, 19 nt, Artificial Sequence
  synthetic
uaauagauuuccucaagga

SEQ ID NO: 2433 - RNA, 19 nt, Artificial Sequence
  synthetic
aauagauuuccucaaggau

SEQ ID NO: 2434 - RNA, 19 nt, Artificial Sequence
  synthetic
auagauuuccucaaggaug

SEQ ID NO: 2435 - RNA, 19 nt, Artificial Sequence
  synthetic
uagauuuccucaaggaugu

SEQ ID NO: 2436 - RNA, 19 nt, Artificial Sequence
  synthetic
agauuuccucaaggaugug

SEQ ID NO: 2437 - RNA, 19 nt, Artificial Sequence
  synthetic
gauuuccucaaggauguga

SEQ ID NO: 2438 - RNA, 19 nt, Artificial Sequence
  synthetic
auuuccucaaggaugugau

SEQ ID NO: 2439 - RNA, 19 nt, Artificial Sequence
  synthetic
uuuccucaaggaugugaug

SEQ ID NO: 2440 - RNA, 19 nt, Artificial Sequence
  synthetic
uuccucaaggaugugaugg

SEQ ID NO: 2441 - RNA, 19 nt, Artificial Sequence
  synthetic
uccucaaggaugugaugga

SEQ ID NO: 2442 - RNA, 19 nt, Artificial Sequence
  synthetic
gaugugauggaaucaaugg

SEQ ID NO: 2443 - RNA, 19 nt, Artificial Sequence
  synthetic
auggaaucaauggauaaag

SEQ ID NO: 2444 - RNA, 19 nt, Artificial Sequence
  synthetic
uggaaucaauggauaaaga

SEQ ID NO: 2445 - RNA, 19 nt, Artificial Sequence
  synthetic
ggaaucaauggauaaagag

SEQ ID NO: 2446 - RNA, 19 nt, Artificial Sequence
  synthetic
gaaucaauggauaaagagg

SEQ ID NO: 2447 - RNA, 19 nt, Artificial Sequence
  synthetic
aaucaauggauaaagagga

SEQ ID NO: 2448 - RNA, 19 nt, Artificial Sequence
  synthetic
aucaauggauaaagaggaa

SEQ ID NO: 2449 - RNA, 19 nt, Artificial Sequence
  synthetic
ucaauggauaaagaggaaa

SEQ ID NO: 2450 - RNA, 19 nt, Artificial Sequence
  synthetic
caauggauaaagaggaaau

SEQ ID NO: 2451 - RNA, 19 nt, Artificial Sequence
  synthetic
gauaaagaggaaauagaga

SEQ ID NO: 2452 - RNA, 19 nt, Artificial Sequence
  synthetic
gagauaacaacacacuuuc

SEQ ID NO: 2453 - RNA, 19 nt, Artificial Sequence
  synthetic
agauaacaacacacuuuca

SEQ ID NO: 2454 - RNA, 19 nt, Artificial Sequence
  synthetic
gauaacaacacacuuucaa

SEQ ID NO: 2455 - RNA, 19 nt, Artificial Sequence
  synthetic
auaacaacacacuuucaaa

SEQ ID NO: 2456 - RNA, 19 nt, Artificial Sequence
  synthetic
uaacaacacacuuucaaag

SEQ ID NO: 2457 - RNA, 19 nt, Artificial Sequence
  synthetic
aacaacacacuuucaaaga

SEQ ID NO: 2458 - RNA, 19 nt, Artificial Sequence
  synthetic
acaacacacuuucaaagaa

SEQ ID NO: 2459 - RNA, 19 nt, Artificial Sequence
  synthetic
caacacacuuucaaagaaa

SEQ ID NO: 2460 - RNA, 19 nt, Artificial Sequence
  synthetic
aacacacuuucaaagaaaa

SEQ ID NO: 2461 - RNA, 19 nt, Artificial Sequence
  synthetic
acacacuuucaaagaaaaa

SEQ ID NO: 2462 - RNA, 19 nt, Artificial Sequence
  synthetic
cacacuuucaaagaaaaag

SEQ ID NO: 2463 - RNA, 19 nt, Artificial Sequence
  synthetic
acacuuucaaagaaaaagg

SEQ ID NO: 2464 - RNA, 19 nt, Artificial Sequence
  synthetic
cacuuucaaagaaaaagga

SEQ ID NO: 2465 - RNA, 19 nt, Artificial Sequence
  synthetic
acuuucaaagaaaaaggag

SEQ ID NO: 2466 - RNA, 19 nt, Artificial Sequence
  synthetic
cuuucaaagaaaaaggaga

SEQ ID NO: 2467 - RNA, 19 nt, Artificial Sequence
  synthetic
uuucaaagaaaaaggagag

SEQ ID NO: 2468 - RNA, 19 nt, Artificial Sequence
  synthetic
uucaaagaaaaaggagagu

SEQ ID NO: 2469 - RNA, 19 nt, Artificial Sequence
  synthetic
ucaaagaaaaaggagagua

SEQ ID NO: 2470 - RNA, 19 nt, Artificial Sequence
  synthetic
caaagaaaaaggagaguaa

SEQ ID NO: 2471 - RNA, 19 nt, Artificial Sequence
  synthetic
aaagaaaaaggagaguaag

SEQ ID NO: 2472 - RNA, 19 nt, Artificial Sequence
  synthetic
aagaaaaaggagaguaaga

SEQ ID NO: 2473 - RNA, 19 nt, Artificial Sequence
  synthetic
agaaaaaggagaguaagag

SEQ ID NO: 2474 - RNA, 19 nt, Artificial Sequence
  synthetic
gaaaaaggagaguaagaga

SEQ ID NO: 2475 - RNA, 19 nt, Artificial Sequence
  synthetic
aaaaaggagaguaagagac

SEQ ID NO: 2476 - RNA, 19 nt, Artificial Sequence
  synthetic
aaaaggagaguaagagaca

SEQ ID NO: 2477 - RNA, 19 nt, Artificial Sequence
  synthetic
aaaggagaguaagagacaa

SEQ ID NO: 2478 - RNA, 19 nt, Artificial Sequence
  synthetic
aaggagaguaagagacaac

SEQ ID NO: 2479 - RNA, 19 nt, Artificial Sequence
  synthetic
aggagaguaagagacaaca

SEQ ID NO: 2480 - RNA, 19 nt, Artificial Sequence
  synthetic
ggagaguaagagacaacau

SEQ ID NO: 2481 - RNA, 19 nt, Artificial Sequence
  synthetic
gagaguaagagacaacaug

SEQ ID NO: 2482 - RNA, 19 nt, Artificial Sequence
  synthetic
agaguaagagacaacauga

SEQ ID NO: 2483 - RNA, 19 nt, Artificial Sequence
  synthetic
gaguaagagacaacaugac

SEQ ID NO: 2484 - RNA, 19 nt, Artificial Sequence
  synthetic
aguaagagacaacaugacc

SEQ ID NO: 2485 - RNA, 19 nt, Artificial Sequence
  synthetic
guaagagacaacaugacca

SEQ ID NO: 2486 - RNA, 19 nt, Artificial Sequence
  synthetic
uaagagacaacaugaccaa

SEQ ID NO: 2487 - RNA, 19 nt, Artificial Sequence
  synthetic
aagagacaacaugaccaag

SEQ ID NO: 2488 - RNA, 19 nt, Artificial Sequence
  synthetic
agagacaacaugaccaaga

SEQ ID NO: 2489 - RNA, 19 nt, Artificial Sequence
  synthetic
gagacaacaugaccaagaa

SEQ ID NO: 2490 - RNA, 19 nt, Artificial Sequence
  synthetic
agacaacaugaccaagaaa

SEQ ID NO: 2491 - RNA, 19 nt, Artificial Sequence
  synthetic
gacaacaugaccaagaaaa

SEQ ID NO: 2492 - RNA, 19 nt, Artificial Sequence
  synthetic
acaacaugaccaagaaaau

SEQ ID NO: 2493 - RNA, 19 nt, Artificial Sequence
  synthetic
caacaugaccaagaaaaug

SEQ ID NO: 2494 - RNA, 19 nt, Artificial Sequence
  synthetic
aacaugaccaagaaaaugg

SEQ ID NO: 2495 - RNA, 19 nt, Artificial Sequence
  synthetic
acaugaccaagaaaauggu

SEQ ID NO: 2496 - RNA, 19 nt, Artificial Sequence
  synthetic
caugaccaagaaaaugguc

SEQ ID NO: 2497 - RNA, 19 nt, Artificial Sequence
  synthetic
augaccaagaaaaugguca

SEQ ID NO: 2498 - RNA, 19 nt, Artificial Sequence
  synthetic
ugaccaagaaaauggucac

SEQ ID NO: 2499 - RNA, 19 nt, Artificial Sequence
  synthetic
gaccaagaaaauggucaca

SEQ ID NO: 2500 - RNA, 19 nt, Artificial Sequence
  synthetic
accaagaaaauggucacac

SEQ ID NO: 2501 - RNA, 19 nt, Artificial Sequence
  synthetic
ccaagaaaauggucacaca

SEQ ID NO: 2502 - RNA, 19 nt, Artificial Sequence
  synthetic
caagaaaauggucacacaa

SEQ ID NO: 2503 - RNA, 19 nt, Artificial Sequence
  synthetic
aagaaaauggucacacaaa

SEQ ID NO: 2504 - RNA, 19 nt, Artificial Sequence
  synthetic
agaaaauggucacacaaag

SEQ ID NO: 2505 - RNA, 19 nt, Artificial Sequence
  synthetic
gaaaauggucacacaaaga

SEQ ID NO: 2506 - RNA, 19 nt, Artificial Sequence
  synthetic
aaaauggucacacaaagaa

SEQ ID NO: 2507 - RNA, 19 nt, Artificial Sequence
  synthetic
aaauggucacacaaagaac

SEQ ID NO: 2508 - RNA, 19 nt, Artificial Sequence
  synthetic
aauggucacacaaagaaca

SEQ ID NO: 2509 - RNA, 19 nt, Artificial Sequence
  synthetic
auggucacacaaagaacaa

SEQ ID NO: 2510 - RNA, 19 nt, Artificial Sequence
  synthetic
uggucacacaaagaacaau

SEQ ID NO: 2511 - RNA, 19 nt, Artificial Sequence
  synthetic
ggucacacaaagaacaaua

SEQ ID NO: 2512 - RNA, 19 nt, Artificial Sequence
  synthetic
gucacacaaagaacaauag

SEQ ID NO: 2513 - RNA, 19 nt, Artificial Sequence
  synthetic
ucacacaaagaacaauagg

SEQ ID NO: 2514 - RNA, 19 nt, Artificial Sequence
  synthetic
auaggaaagaaaaaacaaa

SEQ ID NO: 2515 - RNA, 19 nt, Artificial Sequence
  synthetic
aagaaaaaacaaagaguga

SEQ ID NO: 2516 - RNA, 19 nt, Artificial Sequence
  synthetic
agaaaaaacaaagagugaa

SEQ ID NO: 2517 - RNA, 19 nt, Artificial Sequence
  synthetic
gaaaaaacaaagagugaau

SEQ ID NO: 2518 - RNA, 19 nt, Artificial Sequence
  synthetic
aaaaaacaaagagugaaua

SEQ ID NO: 2519 - RNA, 19 nt, Artificial Sequence
  synthetic
aaaaacaaagagugaauaa

SEQ ID NO: 2520 - RNA, 19 nt, Artificial Sequence
  synthetic
aaaacaaagagugaauaag

SEQ ID NO: 2521 - RNA, 19 nt, Artificial Sequence
  synthetic
aaacaaagagugaauaaga

SEQ ID NO: 2522 - RNA, 19 nt, Artificial Sequence
  synthetic
aacaaagagugaauaagag

SEQ ID NO: 2523 - RNA, 19 nt, Artificial Sequence
  synthetic
acaaagagugaauaagaga

SEQ ID NO: 2524 - RNA, 19 nt, Artificial Sequence
  synthetic
caaagagugaauaagagag

SEQ ID NO: 2525 - RNA, 19 nt, Artificial Sequence
  synthetic
aaagagugaauaagagagg

SEQ ID NO: 2526 - RNA, 19 nt, Artificial Sequence
  synthetic
aagagugaauaagagaggc

SEQ ID NO: 2527 - RNA, 19 nt, Artificial Sequence
  synthetic
agagugaauaagagaggcu

SEQ ID NO: 2528 - RNA, 19 nt, Artificial Sequence
  synthetic
gagugaauaagagaggcua

SEQ ID NO: 2529 - RNA, 19 nt, Artificial Sequence
  synthetic
uaucuaauaagagcuuuga

SEQ ID NO: 2530 - RNA, 19 nt, Artificial Sequence
  synthetic
cuaauaagagcuuugacau

SEQ ID NO: 2531 - RNA, 19 nt, Artificial Sequence
  synthetic
uaauaagagcuuugacauu

SEQ ID NO: 2532 - RNA, 19 nt, Artificial Sequence
  synthetic
aauaagagcuuugacauug

SEQ ID NO: 2533 - RNA, 19 nt, Artificial Sequence
  synthetic
auaagagcuuugacauuga

SEQ ID NO: 2534 - RNA, 19 nt, Artificial Sequence
  synthetic
uaagagcuuugacauugaa

SEQ ID NO: 2535 - RNA, 19 nt, Artificial Sequence
  synthetic
aagagcuuugacauugaac

SEQ ID NO: 2536 - RNA, 19 nt, Artificial Sequence
  synthetic
agagcuuugacauugaaca

SEQ ID NO: 2537 - RNA, 19 nt, Artificial Sequence
  synthetic
gagcuuugacauugaacac

SEQ ID NO: 2538 - RNA, 19 nt, Artificial Sequence
  synthetic
agcuuugacauugaacacg

SEQ ID NO: 2539 - RNA, 19 nt, Artificial Sequence
  synthetic
gcuuugacauugaacacga

SEQ ID NO: 2540 - RNA, 19 nt, Artificial Sequence
  synthetic
cuuugacauugaacacgau

SEQ ID NO: 2541 - RNA, 19 nt, Artificial Sequence
  synthetic
uuugacauugaacacgaug

SEQ ID NO: 2542 - RNA, 19 nt, Artificial Sequence
  synthetic
uugacauugaacacgauga

SEQ ID NO: 2543 - RNA, 19 nt, Artificial Sequence
  synthetic
ugacauugaacacgaugac

SEQ ID NO: 2544 - RNA, 19 nt, Artificial Sequence
  synthetic
gacauugaacacgaugacc

SEQ ID NO: 2545 - RNA, 19 nt, Artificial Sequence
  synthetic
acauugaacacgaugacca

SEQ ID NO: 2546 - RNA, 19 nt, Artificial Sequence
  synthetic
cauugaacacgaugaccaa

SEQ ID NO: 2547 - RNA, 19 nt, Artificial Sequence
  synthetic
auugaacacgaugaccaaa

SEQ ID NO: 2548 - RNA, 19 nt, Artificial Sequence
  synthetic
uugaacacgaugaccaaag

SEQ ID NO: 2549 - RNA, 19 nt, Artificial Sequence
  synthetic
ugaacacgaugaccaaaga

SEQ ID NO: 2550 - RNA, 19 nt, Artificial Sequence
  synthetic
gaacacgaugaccaaagau

SEQ ID NO: 2551 - RNA, 19 nt, Artificial Sequence
  synthetic
aacacgaugaccaaagaug

SEQ ID NO: 2552 - RNA, 19 nt, Artificial Sequence
  synthetic
acacgaugaccaaagaugc

SEQ ID NO: 2553 - RNA, 19 nt, Artificial Sequence
  synthetic
cacgaugaccaaagaugca

SEQ ID NO: 2554 - RNA, 19 nt, Artificial Sequence
  synthetic
acgaugaccaaagaugcag

SEQ ID NO: 2555 - RNA, 19 nt, Artificial Sequence
  synthetic
cgaugaccaaagaugcaga

SEQ ID NO: 2556 - RNA, 19 nt, Artificial Sequence
  synthetic
augaccaaagaugcagaga

SEQ ID NO: 2557 - RNA, 19 nt, Artificial Sequence
  synthetic
ugaccaaagaugcagagag

SEQ ID NO: 2558 - RNA, 19 nt, Artificial Sequence
  synthetic
gaccaaagaugcagagaga

SEQ ID NO: 2559 - RNA, 19 nt, Artificial Sequence
  synthetic
accaaagaugcagagagag

SEQ ID NO: 2560 - RNA, 19 nt, Artificial Sequence
  synthetic
ccaaagaugcagagagagg

SEQ ID NO: 2561 - RNA, 19 nt, Artificial Sequence
  synthetic
aaagaugcagagagaggua

SEQ ID NO: 2562 - RNA, 19 nt, Artificial Sequence
  synthetic
aaauuaaaaagaagggcua

SEQ ID NO: 2563 - RNA, 19 nt, Artificial Sequence
  synthetic
aauuaaaaagaagggcuau

SEQ ID NO: 2564 - RNA, 19 nt, Artificial Sequence
  synthetic
auuaaaaagaagggcuauu

SEQ ID NO: 2565 - RNA, 19 nt, Artificial Sequence
  synthetic
uuaaaaagaagggcuauug

SEQ ID NO: 2566 - RNA, 19 nt, Artificial Sequence
  synthetic
uaaaaagaagggcuauugc

SEQ ID NO: 2567 - RNA, 19 nt, Artificial Sequence
  synthetic
aaaaagaagggcuauugca

SEQ ID NO: 2568 - RNA, 19 nt, Artificial Sequence
  synthetic
aaaagaagggcuauugcaa

SEQ ID NO: 2569 - RNA, 19 nt, Artificial Sequence
  synthetic
aaagaagggcuauugcaac

SEQ ID NO: 2570 - RNA, 19 nt, Artificial Sequence
  synthetic
aagaagggcuauugcaaca

SEQ ID NO: 2571 - RNA, 19 nt, Artificial Sequence
  synthetic
agaagggcuauugcaacac

SEQ ID NO: 2572 - RNA, 19 nt, Artificial Sequence
  synthetic
gaagggcuauugcaacacc

SEQ ID NO: 2573 - RNA, 19 nt, Artificial Sequence
  synthetic
aagggcuauugcaacaccc

SEQ ID NO: 2574 - RNA, 19 nt, Artificial Sequence
  synthetic
agggcuauugcaacacccg

SEQ ID NO: 2575 - RNA, 19 nt, Artificial Sequence
  synthetic
gggcuauugcaacacccgg

SEQ ID NO: 2576 - RNA, 19 nt, Artificial Sequence
  synthetic
ggcuauugcaacacccggg

SEQ ID NO: 2577 - RNA, 19 nt, Artificial Sequence
  synthetic
gcuauugcaacacccggga

SEQ ID NO: 2578 - RNA, 19 nt, Artificial Sequence
  synthetic
cuauugcaacacccgggau

SEQ ID NO: 2579 - RNA, 19 nt, Artificial Sequence
  synthetic
uauugcaacacccgggaug

SEQ ID NO: 2580 - RNA, 19 nt, Artificial Sequence
  synthetic
auugcaacacccgggaugc

SEQ ID NO: 2581 - RNA, 19 nt, Artificial Sequence
  synthetic
uugcaacacccgggaugca

SEQ ID NO: 2582 - RNA, 19 nt, Artificial Sequence
  synthetic
ugcaacacccgggaugcaa

SEQ ID NO: 2583 - RNA, 19 nt, Artificial Sequence
  synthetic
gcaacacccgggaugcaaa

SEQ ID NO: 2584 - RNA, 19 nt, Artificial Sequence
  synthetic
caacacccgggaugcaaau

SEQ ID NO: 2585 - RNA, 19 nt, Artificial Sequence
  synthetic
aacacccgggaugcaaauu

SEQ ID NO: 2586 - RNA, 19 nt, Artificial Sequence
  synthetic
acacccgggaugcaaauua

SEQ ID NO: 2587 - RNA, 19 nt, Artificial Sequence
  synthetic
cacccgggaugcaaauuag

SEQ ID NO: 2588 - RNA, 19 nt, Artificial Sequence
  synthetic
acccgggaugcaaauuaga

SEQ ID NO: 2589 - RNA, 19 nt, Artificial Sequence
  synthetic
cccgggaugcaaauuagag

SEQ ID NO: 2590 - RNA, 19 nt, Artificial Sequence
  synthetic
ccgggaugcaaauuagagg

SEQ ID NO: 2591 - RNA, 19 nt, Artificial Sequence
  synthetic
caaauuagaggguucgugu

SEQ ID NO: 2592 - RNA, 19 nt, Artificial Sequence
  synthetic
uucguguacuucguugaaa

SEQ ID NO: 2593 - RNA, 19 nt, Artificial Sequence
  synthetic
ucguguacuucguugaaac

SEQ ID NO: 2594 - RNA, 19 nt, Artificial Sequence
  synthetic
cguguacuucguugaaacu

SEQ ID NO: 2595 - RNA, 19 nt, Artificial Sequence
  synthetic
guguacuucguugaaacuu

SEQ ID NO: 2596 - RNA, 19 nt, Artificial Sequence
  synthetic
uguacuucguugaaacuuu

SEQ ID NO: 2597 - RNA, 19 nt, Artificial Sequence
  synthetic
guacuucguugaaacuuua

SEQ ID NO: 2598 - RNA, 19 nt, Artificial Sequence
  synthetic
uacuucguugaaacuuuag

SEQ ID NO: 2599 - RNA, 19 nt, Artificial Sequence
  synthetic
acuucguugaaacuuuagc

SEQ ID NO: 2600 - RNA, 19 nt, Artificial Sequence
  synthetic
cuucguugaaacuuuagcu

SEQ ID NO: 2601 - RNA, 19 nt, Artificial Sequence
  synthetic
uucguugaaacuuuagcua

SEQ ID NO: 2602 - RNA, 19 nt, Artificial Sequence
  synthetic
ucguugaaacuuuagcuag

SEQ ID NO: 2603 - RNA, 19 nt, Artificial Sequence
  synthetic
cguugaaacuuuagcuaga

SEQ ID NO: 2604 - RNA, 19 nt, Artificial Sequence
  synthetic
guugaaacuuuagcuagaa

SEQ ID NO: 2605 - RNA, 19 nt, Artificial Sequence
  synthetic
uugaaacuuuagcuagaag

SEQ ID NO: 2606 - RNA, 19 nt, Artificial Sequence
  synthetic
ugaaacuuuagcuagaagc

SEQ ID NO: 2607 - RNA, 19 nt, Artificial Sequence
  synthetic
gaaacuuuagcuagaagca

SEQ ID NO: 2608 - RNA, 19 nt, Artificial Sequence
  synthetic
aaacuuuagcuagaagcau

SEQ ID NO: 2609 - RNA, 19 nt, Artificial Sequence
  synthetic
aacuuuagcuagaagcauu

SEQ ID NO: 2610 - RNA, 19 nt, Artificial Sequence
  synthetic
acuuuagcuagaagcauuu

SEQ ID NO: 2611 - RNA, 19 nt, Artificial Sequence
  synthetic
cuuuagcuagaagcauuug

SEQ ID NO: 2612 - RNA, 19 nt, Artificial Sequence
  synthetic
uuuagcuagaagcauuugc

SEQ ID NO: 2613 - RNA, 19 nt, Artificial Sequence
  synthetic
uuagcuagaagcauuugcg

SEQ ID NO: 2614 - RNA, 19 nt, Artificial Sequence
  synthetic
uagcuagaagcauuugcga

SEQ ID NO: 2615 - RNA, 19 nt, Artificial Sequence
  synthetic
agcuagaagcauuugcgaa

SEQ ID NO: 2616 - RNA, 19 nt, Artificial Sequence
  synthetic
gcuagaagcauuugcgaaa

SEQ ID NO: 2617 - RNA, 19 nt, Artificial Sequence
  synthetic
cuagaagcauuugcgaaaa

SEQ ID NO: 2618 - RNA, 19 nt, Artificial Sequence
  synthetic
uagaagcauuugcgaaaag

SEQ ID NO: 2619 - RNA, 19 nt, Artificial Sequence
  synthetic
agaagcauuugcgaaaagc

SEQ ID NO: 2620 - RNA, 19 nt, Artificial Sequence
  synthetic
gaagcauuugcgaaaagcu

SEQ ID NO: 2621 - RNA, 19 nt, Artificial Sequence
  synthetic
aagcauuugcgaaaagcuu

SEQ ID NO: 2622 - RNA, 19 nt, Artificial Sequence
  synthetic
agcauuugcgaaaagcuug

SEQ ID NO: 2623 - RNA, 19 nt, Artificial Sequence
  synthetic
gcauuugcgaaaagcuuga

SEQ ID NO: 2624 - RNA, 19 nt, Artificial Sequence
  synthetic
cauuugcgaaaagcuugaa

SEQ ID NO: 2625 - RNA, 19 nt, Artificial Sequence
  synthetic
auuugcgaaaagcuugaac

SEQ ID NO: 2626 - RNA, 19 nt, Artificial Sequence
  synthetic
uuugcgaaaagcuugaaca

SEQ ID NO: 2627 - RNA, 19 nt, Artificial Sequence
  synthetic
uugcgaaaagcuugaacag

SEQ ID NO: 2628 - RNA, 19 nt, Artificial Sequence
  synthetic
ugcgaaaagcuugaacagu

SEQ ID NO: 2629 - RNA, 19 nt, Artificial Sequence
  synthetic
gcgaaaagcuugaacaguc

SEQ ID NO: 2630 - RNA, 19 nt, Artificial Sequence
  synthetic
cgaaaagcuugaacagucu

SEQ ID NO: 2631 - RNA, 19 nt, Artificial Sequence
  synthetic
gaaaagcuugaacagucug

SEQ ID NO: 2632 - RNA, 19 nt, Artificial Sequence
  synthetic
aaaagcuugaacagucugg

SEQ ID NO: 2633 - RNA, 19 nt, Artificial Sequence
  synthetic
aaagcuugaacagucugga

SEQ ID NO: 2634 - RNA, 19 nt, Artificial Sequence
  synthetic
aagcuugaacagucuggac

SEQ ID NO: 2635 - RNA, 19 nt, Artificial Sequence
  synthetic
agcuugaacagucuggacu

SEQ ID NO: 2636 - RNA, 19 nt, Artificial Sequence
  synthetic
cuuccgguuggggguaaug

SEQ ID NO: 2637 - RNA, 19 nt, Artificial Sequence
  synthetic
gaaaagaaggccaaacugg

SEQ ID NO: 2638 - RNA, 19 nt, Artificial Sequence
  synthetic
aagaaggccaaacuggcaa

SEQ ID NO: 2639 - RNA, 19 nt, Artificial Sequence
  synthetic
agaaggccaaacuggcaaa

SEQ ID NO: 2640 - RNA, 19 nt, Artificial Sequence
  synthetic
gaaggccaaacuggcaaau

SEQ ID NO: 2641 - RNA, 19 nt, Artificial Sequence
  synthetic
aaggccaaacuggcaaaug

SEQ ID NO: 2642 - RNA, 19 nt, Artificial Sequence
  synthetic
aggccaaacuggcaaaugu

SEQ ID NO: 2643 - RNA, 19 nt, Artificial Sequence
  synthetic
ggccaaacuggcaaauguu

SEQ ID NO: 2644 - RNA, 19 nt, Artificial Sequence
  synthetic
gccaaacuggcaaauguug

SEQ ID NO: 2645 - RNA, 19 nt, Artificial Sequence
  synthetic
ccaaacuggcaaauguugu

SEQ ID NO: 2646 - RNA, 19 nt, Artificial Sequence
  synthetic
caaacuggcaaauguugug

SEQ ID NO: 2647 - RNA, 19 nt, Artificial Sequence
  synthetic
aaacuggcaaauguuguga

SEQ ID NO: 2648 - RNA, 19 nt, Artificial Sequence
  synthetic
aacuggcaaauguugugag

SEQ ID NO: 2649 - RNA, 19 nt, Artificial Sequence
  synthetic
acuggcaaauguugugaga

SEQ ID NO: 2650 - RNA, 19 nt, Artificial Sequence
  synthetic
cuggcaaauguugugagaa

SEQ ID NO: 2651 - RNA, 19 nt, Artificial Sequence
  synthetic
uggcaaauguugugagaaa

SEQ ID NO: 2652 - RNA, 19 nt, Artificial Sequence
  synthetic
gcaaauguugugagaaaga

SEQ ID NO: 2653 - RNA, 19 nt, Artificial Sequence
  synthetic
augaugacuaauucacaag

SEQ ID NO: 2654 - RNA, 19 nt, Artificial Sequence
  synthetic
ugaugacuaauucacaaga

SEQ ID NO: 2655 - RNA, 19 nt, Artificial Sequence
  synthetic
gaugacuaauucacaagac

SEQ ID NO: 2656 - RNA, 19 nt, Artificial Sequence
  synthetic
augacuaauucacaagaca

SEQ ID NO: 2657 - RNA, 19 nt, Artificial Sequence
  synthetic
ugacuaauucacaagacac

SEQ ID NO: 2658 - RNA, 19 nt, Artificial Sequence
  synthetic
gacacagagcuuucuuuca

SEQ ID NO: 2659 - RNA, 19 nt, Artificial Sequence
  synthetic
gagcuuucuuucacaauca

SEQ ID NO: 2660 - RNA, 19 nt, Artificial Sequence
  synthetic
agcuuucuuucacaaucac

SEQ ID NO: 2661 - RNA, 19 nt, Artificial Sequence
  synthetic
gcuuucuuucacaaucacu

SEQ ID NO: 2662 - RNA, 19 nt, Artificial Sequence
  synthetic
cuuucuuucacaaucacug

SEQ ID NO: 2663 - RNA, 19 nt, Artificial Sequence
  synthetic
uuucuuucacaaucacugg

SEQ ID NO: 2664 - RNA, 19 nt, Artificial Sequence
  synthetic
uucuuucacaaucacuggg

SEQ ID NO: 2665 - RNA, 19 nt, Artificial Sequence
  synthetic
ucuuucacaaucacugggg

SEQ ID NO: 2666 - RNA, 19 nt, Artificial Sequence
  synthetic
cuuucacaaucacugggga

SEQ ID NO: 2667 - RNA, 19 nt, Artificial Sequence
  synthetic
uuucacaaucacuggggac

SEQ ID NO: 2668 - RNA, 19 nt, Artificial Sequence
  synthetic
uucacaaucacuggggaca

SEQ ID NO: 2669 - RNA, 19 nt, Artificial Sequence
  synthetic
ucacaaucacuggggacaa

SEQ ID NO: 2670 - RNA, 19 nt, Artificial Sequence
  synthetic
acaaucacuggggacaaca

SEQ ID NO: 2671 - RNA, 19 nt, Artificial Sequence
  synthetic
gacaacacuaaguggaaug

SEQ ID NO: 2672 - RNA, 19 nt, Artificial Sequence
  synthetic
acaacacuaaguggaauga

SEQ ID NO: 2673 - RNA, 19 nt, Artificial Sequence
  synthetic
caacacuaaguggaaugaa

SEQ ID NO: 2674 - RNA, 19 nt, Artificial Sequence
  synthetic
aacacuaaguggaaugaaa

SEQ ID NO: 2675 - RNA, 19 nt, Artificial Sequence
  synthetic
acacuaaguggaaugaaaa

SEQ ID NO: 2676 - RNA, 19 nt, Artificial Sequence
  synthetic
acuaaguggaaugaaaauc

SEQ ID NO: 2677 - RNA, 19 nt, Artificial Sequence
  synthetic
caaaacccucgaauguucu

SEQ ID NO: 2678 - RNA, 19 nt, Artificial Sequence
  synthetic
uuggcgaugauuacauaua

SEQ ID NO: 2679 - RNA, 19 nt, Artificial Sequence
  synthetic
uggcgaugauuacauauau

SEQ ID NO: 2680 - RNA, 19 nt, Artificial Sequence
  synthetic
ggcgaugauuacauauauc

SEQ ID NO: 2681 - RNA, 19 nt, Artificial Sequence
  synthetic
gcgaugauuacauauauca

SEQ ID NO: 2682 - RNA, 19 nt, Artificial Sequence
  synthetic
cgaugauuacauauaucac

SEQ ID NO: 2683 - RNA, 19 nt, Artificial Sequence
  synthetic
gaugauuacauauaucaca

SEQ ID NO: 2684 - RNA, 19 nt, Artificial Sequence
  synthetic
augauuacauauaucacaa

SEQ ID NO: 2685 - RNA, 19 nt, Artificial Sequence
  synthetic
ugauuacauauaucacaaa

SEQ ID NO: 2686 - RNA, 19 nt, Artificial Sequence
  synthetic
gauuacauauaucacaaaa

SEQ ID NO: 2687 - RNA, 19 nt, Artificial Sequence
  synthetic
auuacauauaucacaaaaa

SEQ ID NO: 2688 - RNA, 19 nt, Artificial Sequence
  synthetic
uuacauauaucacaaaaaa

SEQ ID NO: 2689 - RNA, 19 nt, Artificial Sequence
  synthetic
uacauauaucacaaaaaau

SEQ ID NO: 2690 - RNA, 19 nt, Artificial Sequence
  synthetic
acauauaucacaaaaaauc

SEQ ID NO: 2691 - RNA, 19 nt, Artificial Sequence
  synthetic
cauauaucacaaaaaauca

SEQ ID NO: 2692 - RNA, 19 nt, Artificial Sequence
  synthetic
auauaucacaaaaaaucaa

SEQ ID NO: 2693 - RNA, 19 nt, Artificial Sequence
  synthetic
uauaucacaaaaaaucaac

SEQ ID NO: 2694 - RNA, 19 nt, Artificial Sequence
  synthetic
auaucacaaaaaaucaacc

SEQ ID NO: 2695 - RNA, 19 nt, Artificial Sequence
  synthetic
uaucacaaaaaaucaaccu

SEQ ID NO: 2696 - RNA, 19 nt, Artificial Sequence
  synthetic
aucacaaaaaaucaaccug

SEQ ID NO: 2697 - RNA, 19 nt, Artificial Sequence
  synthetic
ucacaaaaaaucaaccuga

SEQ ID NO: 2698 - RNA, 19 nt, Artificial Sequence
  synthetic
cacaaaaaaucaaccugag

SEQ ID NO: 2699 - RNA, 19 nt, Artificial Sequence
  synthetic
acaaaaaaucaaccugagu

SEQ ID NO: 2700 - RNA, 19 nt, Artificial Sequence
  synthetic
caaaaaaucaaccugagug

SEQ ID NO: 2701 - RNA, 19 nt, Artificial Sequence
  synthetic
aaaaaaucaaccugagugg

SEQ ID NO: 2702 - RNA, 19 nt, Artificial Sequence
  synthetic
aaaaaucaaccugaguggu

SEQ ID NO: 2703 - RNA, 19 nt, Artificial Sequence
  synthetic
aaaaucaaccugagugguu

SEQ ID NO: 2704 - RNA, 19 nt, Artificial Sequence
  synthetic
aaaucaaccugagugguuc

SEQ ID NO: 2705 - RNA, 19 nt, Artificial Sequence
  synthetic
aaucaaccugagugguuca

SEQ ID NO: 2706 - RNA, 19 nt, Artificial Sequence
  synthetic
aucaaccugagugguucag

SEQ ID NO: 2707 - RNA, 19 nt, Artificial Sequence
  synthetic
ucaaccugagugguucaga

SEQ ID NO: 2708 - RNA, 19 nt, Artificial Sequence
  synthetic
caaccugagugguucagaa

SEQ ID NO: 2709 - RNA, 19 nt, Artificial Sequence
  synthetic
aaccugagugguucagaaa

SEQ ID NO: 2710 - RNA, 19 nt, Artificial Sequence
  synthetic
accugagugguucagaaac

SEQ ID NO: 2711 - RNA, 19 nt, Artificial Sequence
  synthetic
ccugagugguucagaaaca

SEQ ID NO: 2712 - RNA, 19 nt, Artificial Sequence
  synthetic
cugagugguucagaaacau

SEQ ID NO: 2713 - RNA, 19 nt, Artificial Sequence
  synthetic
ugagugguucagaaacauc

SEQ ID NO: 2714 - RNA, 19 nt, Artificial Sequence
  synthetic
gagugguucagaaacaucc

SEQ ID NO: 2715 - RNA, 19 nt, Artificial Sequence
  synthetic
agugguucagaaacauccu

SEQ ID NO: 2716 - RNA, 19 nt, Artificial Sequence
  synthetic
gugguucagaaacauccug

SEQ ID NO: 2717 - RNA, 19 nt, Artificial Sequence
  synthetic
ugguucagaaacauccuga

SEQ ID NO: 2718 - RNA, 19 nt, Artificial Sequence
  synthetic
gguucagaaacauccugag

SEQ ID NO: 2719 - RNA, 19 nt, Artificial Sequence
  synthetic
guucagaaacauccugagc

SEQ ID NO: 2720 - RNA, 19 nt, Artificial Sequence
  synthetic
uucagaaacauccugagca

SEQ ID NO: 2721 - RNA, 19 nt, Artificial Sequence
  synthetic
ucagaaacauccugagcau

SEQ ID NO: 2722 - RNA, 19 nt, Artificial Sequence
  synthetic
cagaaacauccugagcauc

SEQ ID NO: 2723 - RNA, 19 nt, Artificial Sequence
  synthetic
agaaacauccugagcaucg

SEQ ID NO: 2724 - RNA, 19 nt, Artificial Sequence
  synthetic
gaaacauccugagcaucgc

SEQ ID NO: 2725 - RNA, 19 nt, Artificial Sequence
  synthetic
aaacauccugagcaucgca

SEQ ID NO: 2726 - RNA, 19 nt, Artificial Sequence
  synthetic
aacauccugagcaucgcac

SEQ ID NO: 2727 - RNA, 19 nt, Artificial Sequence
  synthetic
acauccugagcaucgcacc

SEQ ID NO: 2728 - RNA, 19 nt, Artificial Sequence
  synthetic
cauccugagcaucgcacca

SEQ ID NO: 2729 - RNA, 19 nt, Artificial Sequence
  synthetic
auccugagcaucgcaccaa

SEQ ID NO: 2730 - RNA, 19 nt, Artificial Sequence
  synthetic
uccugagcaucgcaccaau

SEQ ID NO: 2731 - RNA, 19 nt, Artificial Sequence
  synthetic
ccugagcaucgcaccaaua

SEQ ID NO: 2732 - RNA, 19 nt, Artificial Sequence
  synthetic
cugagcaucgcaccaauaa

SEQ ID NO: 2733 - RNA, 19 nt, Artificial Sequence
  synthetic
ugagcaucgcaccaauaau

SEQ ID NO: 2734 - RNA, 19 nt, Artificial Sequence
  synthetic
gagcaucgcaccaauaaug

SEQ ID NO: 2735 - RNA, 19 nt, Artificial Sequence
  synthetic
agcaucgcaccaauaaugu

SEQ ID NO: 2736 - RNA, 19 nt, Artificial Sequence
  synthetic
gcaucgcaccaauaauguu

SEQ ID NO: 2737 - RNA, 19 nt, Artificial Sequence
  synthetic
caucgcaccaauaauguuc

SEQ ID NO: 2738 - RNA, 19 nt, Artificial Sequence
  synthetic
aucgcaccaauaauguucu

SEQ ID NO: 2739 - RNA, 19 nt, Artificial Sequence
  synthetic
ucgcaccaauaauguucuc

SEQ ID NO: 2740 - RNA, 19 nt, Artificial Sequence
  synthetic
cgcaccaauaauguucuca

SEQ ID NO: 2741 - RNA, 19 nt, Artificial Sequence
  synthetic
gcaccaauaauguucucaa

SEQ ID NO: 2742 - RNA, 19 nt, Artificial Sequence
  synthetic
caccaauaauguucucaaa

SEQ ID NO: 2743 - RNA, 19 nt, Artificial Sequence
  synthetic
accaauaauguucucaaac

SEQ ID NO: 2744 - RNA, 19 nt, Artificial Sequence
  synthetic
ccaauaauguucucaaaca

SEQ ID NO: 2745 - RNA, 19 nt, Artificial Sequence
  synthetic
caauaauguucucaaacaa

SEQ ID NO: 2746 - RNA, 19 nt, Artificial Sequence
  synthetic
aauaauguucucaaacaaa

SEQ ID NO: 2747 - RNA, 19 nt, Artificial Sequence
  synthetic
auaauguucucaaacaaaa

SEQ ID NO: 2748 - RNA, 19 nt, Artificial Sequence
  synthetic
uaauguucucaaacaaaau

SEQ ID NO: 2749 - RNA, 19 nt, Artificial Sequence
  synthetic
aauguucucaaacaaaaug

SEQ ID NO: 2750 - RNA, 19 nt, Artificial Sequence
  synthetic
auguucucaaacaaaaugg

SEQ ID NO: 2751 - RNA, 19 nt, Artificial Sequence
  synthetic
uguucucaaacaaaauggc

SEQ ID NO: 2752 - RNA, 19 nt, Artificial Sequence
  synthetic
guucucaaacaaaauggca

SEQ ID NO: 2753 - RNA, 19 nt, Artificial Sequence
  synthetic
uucucaaacaaaauggcaa

SEQ ID NO: 2754 - RNA, 19 nt, Artificial Sequence
  synthetic
ucucaaacaaaauggcaag

SEQ ID NO: 2755 - RNA, 19 nt, Artificial Sequence
  synthetic
cucaaacaaaauggcaaga

SEQ ID NO: 2756 - RNA, 19 nt, Artificial Sequence
  synthetic
ucaaacaaaauggcaagac

SEQ ID NO: 2757 - RNA, 19 nt, Artificial Sequence
  synthetic
caaacaaaauggcaagacu

SEQ ID NO: 2758 - RNA, 19 nt, Artificial Sequence
  synthetic
aaacaaaauggcaagacua

SEQ ID NO: 2759 - RNA, 19 nt, Artificial Sequence
  synthetic
aacaaaauggcaagacuag

SEQ ID NO: 2760 - RNA, 19 nt, Artificial Sequence
  synthetic
acaaaauggcaagacuagg

SEQ ID NO: 2761 - RNA, 19 nt, Artificial Sequence
  synthetic
caaaauggcaagacuagga

SEQ ID NO: 2762 - RNA, 19 nt, Artificial Sequence
  synthetic
aaaauggcaagacuaggaa

SEQ ID NO: 2763 - RNA, 19 nt, Artificial Sequence
  synthetic
aaauggcaagacuaggaaa

SEQ ID NO: 2764 - RNA, 19 nt, Artificial Sequence
  synthetic
aauggcaagacuaggaaaa

SEQ ID NO: 2765 - RNA, 19 nt, Artificial Sequence
  synthetic
auggcaagacuaggaaaag

SEQ ID NO: 2766 - RNA, 19 nt, Artificial Sequence
  synthetic
uggcaagacuaggaaaagg

SEQ ID NO: 2767 - RNA, 19 nt, Artificial Sequence
  synthetic
ggcaagacuaggaaaagga

SEQ ID NO: 2768 - RNA, 19 nt, Artificial Sequence
  synthetic
gcaagacuaggaaaaggau

SEQ ID NO: 2769 - RNA, 19 nt, Artificial Sequence
  synthetic
caagacuaggaaaaggaua

SEQ ID NO: 2770 - RNA, 19 nt, Artificial Sequence
  synthetic
aagacuaggaaaaggauac

SEQ ID NO: 2771 - RNA, 19 nt, Artificial Sequence
  synthetic
agacuaggaaaaggauaca

SEQ ID NO: 2772 - RNA, 19 nt, Artificial Sequence
  synthetic
gacuaggaaaaggauacau

SEQ ID NO: 2773 - RNA, 19 nt, Artificial Sequence
  synthetic
acuaggaaaaggauacaug

SEQ ID NO: 2774 - RNA, 19 nt, Artificial Sequence
  synthetic
cuaggaaaaggauacaugu

SEQ ID NO: 2775 - RNA, 19 nt, Artificial Sequence
  synthetic
uaggaaaaggauacauguu

SEQ ID NO: 2776 - RNA, 19 nt, Artificial Sequence
  synthetic
aggaaaaggauacauguuc

SEQ ID NO: 2777 - RNA, 19 nt, Artificial Sequence
  synthetic
ggaaaaggauacauguucg

SEQ ID NO: 2778 - RNA, 19 nt, Artificial Sequence
  synthetic
gaaaaggauacauguucga

SEQ ID NO: 2779 - RNA, 19 nt, Artificial Sequence
  synthetic
aaaaggauacauguucgag

SEQ ID NO: 2780 - RNA, 19 nt, Artificial Sequence
  synthetic
aaaggauacauguucgaga

SEQ ID NO: 2781 - RNA, 19 nt, Artificial Sequence
  synthetic
aaggauacauguucgagag

SEQ ID NO: 2782 - RNA, 19 nt, Artificial Sequence
  synthetic
aggauacauguucgagagu

SEQ ID NO: 2783 - RNA, 19 nt, Artificial Sequence
  synthetic
ggauacauguucgagagua

SEQ ID NO: 2784 - RNA, 19 nt, Artificial Sequence
  synthetic
gauacauguucgagaguaa

SEQ ID NO: 2785 - RNA, 19 nt, Artificial Sequence
  synthetic
auacauguucgagaguaag

SEQ ID NO: 2786 - RNA, 19 nt, Artificial Sequence
  synthetic
uacauguucgagaguaaga

SEQ ID NO: 2787 - RNA, 19 nt, Artificial Sequence
  synthetic
acauguucgagaguaagag

SEQ ID NO: 2788 - RNA, 19 nt, Artificial Sequence
  synthetic
cauguucgagaguaagaga

SEQ ID NO: 2789 - RNA, 19 nt, Artificial Sequence
  synthetic
auguucgagaguaagagaa

SEQ ID NO: 2790 - RNA, 19 nt, Artificial Sequence
  synthetic
uguucgagaguaagagaau

SEQ ID NO: 2791 - RNA, 19 nt, Artificial Sequence
  synthetic
guucgagaguaagagaaug

SEQ ID NO: 2792 - RNA, 19 nt, Artificial Sequence
  synthetic
uucgagaguaagagaauga

SEQ ID NO: 2793 - RNA, 19 nt, Artificial Sequence
  synthetic
ucgagaguaagagaaugaa

SEQ ID NO: 2794 - RNA, 19 nt, Artificial Sequence
  synthetic
agaaugaagcuccgaacac

SEQ ID NO: 2795 - RNA, 19 nt, Artificial Sequence
  synthetic
cuccgaacacaaauacccg

SEQ ID NO: 2796 - RNA, 19 nt, Artificial Sequence
  synthetic
uccgaacacaaauacccgc

SEQ ID NO: 2797 - RNA, 19 nt, Artificial Sequence
  synthetic
ccgaacacaaauacccgca

SEQ ID NO: 2798 - RNA, 19 nt, Artificial Sequence
  synthetic
cgaacacaaauacccgcag

SEQ ID NO: 2799 - RNA, 19 nt, Artificial Sequence
  synthetic
gaacacaaauacccgcaga

SEQ ID NO: 2800 - RNA, 19 nt, Artificial Sequence
  synthetic
aacacaaauacccgcagaa

SEQ ID NO: 2801 - RNA, 19 nt, Artificial Sequence
  synthetic
acacaaauacccgcagaaa

SEQ ID NO: 2802 - RNA, 19 nt, Artificial Sequence
  synthetic
cacaaauacccgcagaaau

SEQ ID NO: 2803 - RNA, 19 nt, Artificial Sequence
  synthetic
acaaauacccgcagaaaug

SEQ ID NO: 2804 - RNA, 19 nt, Artificial Sequence
  synthetic
caaauacccgcagaaaugc

SEQ ID NO: 2805 - RNA, 19 nt, Artificial Sequence
  synthetic
aaauacccgcagaaaugcu

SEQ ID NO: 2806 - RNA, 19 nt, Artificial Sequence
  synthetic
aauacccgcagaaaugcua

SEQ ID NO: 2807 - RNA, 19 nt, Artificial Sequence
  synthetic
auacccgcagaaaugcuag

SEQ ID NO: 2808 - RNA, 19 nt, Artificial Sequence
  synthetic
uacccgcagaaaugcuagc

SEQ ID NO: 2809 - RNA, 19 nt, Artificial Sequence
  synthetic
acccgcagaaaugcuagca

SEQ ID NO: 2810 - RNA, 19 nt, Artificial Sequence
  synthetic
cccgcagaaaugcuagcaa

SEQ ID NO: 2811 - RNA, 19 nt, Artificial Sequence
  synthetic
ccgcagaaaugcuagcaag

SEQ ID NO: 2812 - RNA, 19 nt, Artificial Sequence
  synthetic
cgcagaaaugcuagcaagc

SEQ ID NO: 2813 - RNA, 19 nt, Artificial Sequence
  synthetic
gcagaaaugcuagcaagca

SEQ ID NO: 2814 - RNA, 19 nt, Artificial Sequence
  synthetic
cagaaaugcuagcaagcau

SEQ ID NO: 2815 - RNA, 19 nt, Artificial Sequence
  synthetic
cuagcaagcaucgaccuga

SEQ ID NO: 2816 - RNA, 19 nt, Artificial Sequence
  synthetic
aaguauuucaaugaaucaa

SEQ ID NO: 2817 - RNA, 19 nt, Artificial Sequence
  synthetic
gaaucaacaaggaagaaaa

SEQ ID NO: 2818 - RNA, 19 nt, Artificial Sequence
  synthetic
aaucaacaaggaagaaaau

SEQ ID NO: 2819 - RNA, 19 nt, Artificial Sequence
  synthetic
aucaacaaggaagaaaauu

SEQ ID NO: 2820 - RNA, 19 nt, Artificial Sequence
  synthetic
ucaacaaggaagaaaauug

SEQ ID NO: 2821 - RNA, 19 nt, Artificial Sequence
  synthetic
caacaaggaagaaaauuga

SEQ ID NO: 2822 - RNA, 19 nt, Artificial Sequence
  synthetic
aacaaggaagaaaauugag

SEQ ID NO: 2823 - RNA, 19 nt, Artificial Sequence
  synthetic
acaaggaagaaaauugaga

SEQ ID NO: 2824 - RNA, 19 nt, Artificial Sequence
  synthetic
aagaaaauugagaaaauaa

SEQ ID NO: 2825 - RNA, 19 nt, Artificial Sequence
  synthetic
agaaaauugagaaaauaag

SEQ ID NO: 2826 - RNA, 19 nt, Artificial Sequence
  synthetic
gaaaauugagaaaauaagg

SEQ ID NO: 2827 - RNA, 19 nt, Artificial Sequence
  synthetic
aaaauugagaaaauaaggc

SEQ ID NO: 2828 - RNA, 19 nt, Artificial Sequence
  synthetic
aaauugagaaaauaaggcc

SEQ ID NO: 2829 - RNA, 19 nt, Artificial Sequence
  synthetic
aauugagaaaauaaggccu

SEQ ID NO: 2830 - RNA, 19 nt, Artificial Sequence
  synthetic
auugagaaaauaaggccuc

SEQ ID NO: 2831 - RNA, 19 nt, Artificial Sequence
  synthetic
uugagaaaauaaggccucu

SEQ ID NO: 2832 - RNA, 19 nt, Artificial Sequence
  synthetic
ugagaaaauaaggccucuu

SEQ ID NO: 2833 - RNA, 19 nt, Artificial Sequence
  synthetic
gagaaaauaaggccucuuc

SEQ ID NO: 2834 - RNA, 19 nt, Artificial Sequence
  synthetic
agaaaauaaggccucuucu

SEQ ID NO: 2835 - RNA, 19 nt, Artificial Sequence
  synthetic
gaaaauaaggccucuucua

SEQ ID NO: 2836 - RNA, 19 nt, Artificial Sequence
  synthetic
aaaauaaggccucuucuaa

SEQ ID NO: 2837 - RNA, 19 nt, Artificial Sequence
  synthetic
aaauaaggccucuucuaau

SEQ ID NO: 2838 - RNA, 19 nt, Artificial Sequence
  synthetic
aauaaggccucuucuaaua

SEQ ID NO: 2839 - RNA, 19 nt, Artificial Sequence
  synthetic
auaaggccucuucuaauag

SEQ ID NO: 2840 - RNA, 19 nt, Artificial Sequence
  synthetic
uaaggccucuucuaauaga

SEQ ID NO: 2841 - RNA, 19 nt, Artificial Sequence
  synthetic
auagauggcacagcaucau

SEQ ID NO: 2842 - RNA, 19 nt, Artificial Sequence
  synthetic
ggcacagcaucauugagcc

SEQ ID NO: 2843 - RNA, 19 nt, Artificial Sequence
  synthetic
gcacagcaucauugagccc

SEQ ID NO: 2844 - RNA, 19 nt, Artificial Sequence
  synthetic
cacagcaucauugagcccu

SEQ ID NO: 2845 - RNA, 19 nt, Artificial Sequence
  synthetic
acagcaucauugagcccug

SEQ ID NO: 2846 - RNA, 19 nt, Artificial Sequence
  synthetic
cagcaucauugagcccugg

SEQ ID NO: 2847 - RNA, 19 nt, Artificial Sequence
  synthetic
agcaucauugagcccuggg

SEQ ID NO: 2848 - RNA, 19 nt, Artificial Sequence
  synthetic
gcaucauugagcccuggga

SEQ ID NO: 2849 - RNA, 19 nt, Artificial Sequence
  synthetic
caucauugagcccugggau

SEQ ID NO: 2850 - RNA, 19 nt, Artificial Sequence
  synthetic
aucauugagcccugggaug

SEQ ID NO: 2851 - RNA, 19 nt, Artificial Sequence
  synthetic
ucauugagcccugggauga

SEQ ID NO: 2852 - RNA, 19 nt, Artificial Sequence
  synthetic
cauugagcccugggaugau

SEQ ID NO: 2853 - RNA, 19 nt, Artificial Sequence
  synthetic
auugagcccugggaugaug

SEQ ID NO: 2854 - RNA, 19 nt, Artificial Sequence
  synthetic
uugagcccugggaugauga

SEQ ID NO: 2855 - RNA, 19 nt, Artificial Sequence
  synthetic
ugagcccugggaugaugau

SEQ ID NO: 2856 - RNA, 19 nt, Artificial Sequence
  synthetic
gagcccugggaugaugaug

SEQ ID NO: 2857 - RNA, 19 nt, Artificial Sequence
  synthetic
agcccugggaugaugaugg

SEQ ID NO: 2858 - RNA, 19 nt, Artificial Sequence
  synthetic
gcccugggaugaugauggg

SEQ ID NO: 2859 - RNA, 19 nt, Artificial Sequence
  synthetic
cccugggaugaugaugggc

SEQ ID NO: 2860 - RNA, 19 nt, Artificial Sequence
  synthetic
ccugggaugaugaugggca

SEQ ID NO: 2861 - RNA, 19 nt, Artificial Sequence
  synthetic
cugggaugaugaugggcau

SEQ ID NO: 2862 - RNA, 19 nt, Artificial Sequence
  synthetic
ugggaugaugaugggcaug

SEQ ID NO: 2863 - RNA, 19 nt, Artificial Sequence
  synthetic
gggaugaugaugggcaugu

SEQ ID NO: 2864 - RNA, 19 nt, Artificial Sequence
  synthetic
ggaugaugaugggcauguu

SEQ ID NO: 2865 - RNA, 19 nt, Artificial Sequence
  synthetic
gaugaugaugggcauguuc

SEQ ID NO: 2866 - RNA, 19 nt, Artificial Sequence
  synthetic
augaugaugggcauguuca

SEQ ID NO: 2867 - RNA, 19 nt, Artificial Sequence
  synthetic
ugaugaugggcauguucaa

SEQ ID NO: 2868 - RNA, 19 nt, Artificial Sequence
  synthetic
gaugaugggcauguucaac

SEQ ID NO: 2869 - RNA, 19 nt, Artificial Sequence
  synthetic
augaugggcauguucaaca

SEQ ID NO: 2870 - RNA, 19 nt, Artificial Sequence
  synthetic
ugaugggcauguucaacau

SEQ ID NO: 2871 - RNA, 19 nt, Artificial Sequence
  synthetic
gaugggcauguucaacaug

SEQ ID NO: 2872 - RNA, 19 nt, Artificial Sequence
  synthetic
augggcauguucaacaugc

SEQ ID NO: 2873 - RNA, 19 nt, Artificial Sequence
  synthetic
ugggcauguucaacaugcu

SEQ ID NO: 2874 - RNA, 19 nt, Artificial Sequence
  synthetic
gggcauguucaacaugcua

SEQ ID NO: 2875 - RNA, 19 nt, Artificial Sequence
  synthetic
ggcauguucaacaugcuaa

SEQ ID NO: 2876 - RNA, 19 nt, Artificial Sequence
  synthetic
gcauguucaacaugcuaag

SEQ ID NO: 2877 - RNA, 19 nt, Artificial Sequence
  synthetic
cauguucaacaugcuaagu

SEQ ID NO: 2878 - RNA, 19 nt, Artificial Sequence
  synthetic
auguucaacaugcuaagua

SEQ ID NO: 2879 - RNA, 19 nt, Artificial Sequence
  synthetic
uguucaacaugcuaaguac

SEQ ID NO: 2880 - RNA, 19 nt, Artificial Sequence
  synthetic
guucaacaugcuaaguacg

SEQ ID NO: 2881 - RNA, 19 nt, Artificial Sequence
  synthetic
uucaacaugcuaaguacgg

SEQ ID NO: 2882 - RNA, 19 nt, Artificial Sequence
  synthetic
ucaacaugcuaaguacggu

SEQ ID NO: 2883 - RNA, 19 nt, Artificial Sequence
  synthetic
caacaugcuaaguacgguu

SEQ ID NO: 2884 - RNA, 19 nt, Artificial Sequence
  synthetic
aacaugcuaaguacgguuu

SEQ ID NO: 2885 - RNA, 19 nt, Artificial Sequence
  synthetic
acaugcuaaguacgguuuu

SEQ ID NO: 2886 - RNA, 19 nt, Artificial Sequence
  synthetic
caugcuaaguacgguuuua

SEQ ID NO: 2887 - RNA, 19 nt, Artificial Sequence
  synthetic
augcuaaguacgguuuuag

SEQ ID NO: 2888 - RNA, 19 nt, Artificial Sequence
  synthetic
ugcuaaguacgguuuuagg

SEQ ID NO: 2889 - RNA, 19 nt, Artificial Sequence
  synthetic
gcuaaguacgguuuuagga

SEQ ID NO: 2890 - RNA, 19 nt, Artificial Sequence
  synthetic
cuaaguacgguuuuaggag

SEQ ID NO: 2891 - RNA, 19 nt, Artificial Sequence
  synthetic
uaaguacgguuuuaggagu

SEQ ID NO: 2892 - RNA, 19 nt, Artificial Sequence
  synthetic
aaguacgguuuuaggaguc

SEQ ID NO: 2893 - RNA, 19 nt, Artificial Sequence
  synthetic
aguacgguuuuaggagucu

SEQ ID NO: 2894 - RNA, 19 nt, Artificial Sequence
  synthetic
guacgguuuuaggagucuc

SEQ ID NO: 2895 - RNA, 19 nt, Artificial Sequence
  synthetic
guuuuaggagucucgauac

SEQ ID NO: 2896 - RNA, 19 nt, Artificial Sequence
  synthetic
uuuuaggagucucgauacu

SEQ ID NO: 2897 - RNA, 19 nt, Artificial Sequence
  synthetic
uuuaggagucucgauacug

SEQ ID NO: 2898 - RNA, 19 nt, Artificial Sequence
  synthetic
uuaggagucucgauacuga

SEQ ID NO: 2899 - RNA, 19 nt, Artificial Sequence
  synthetic
uaggagucucgauacugaa

SEQ ID NO: 2900 - RNA, 19 nt, Artificial Sequence
  synthetic
aggagucucgauacugaau

SEQ ID NO: 2901 - RNA, 19 nt, Artificial Sequence
  synthetic
ggagucucgauacugaauc

SEQ ID NO: 2902 - RNA, 19 nt, Artificial Sequence
  synthetic
gagucucgauacugaaucu

SEQ ID NO: 2903 - RNA, 19 nt, Artificial Sequence
  synthetic
agucucgauacugaaucuu

SEQ ID NO: 2904 - RNA, 19 nt, Artificial Sequence
  synthetic
gucucgauacugaaucuug

SEQ ID NO: 2905 - RNA, 19 nt, Artificial Sequence
  synthetic
ucucgauacugaaucuugg

SEQ ID NO: 2906 - RNA, 19 nt, Artificial Sequence
  synthetic
auacugaaucuugggcaaa

SEQ ID NO: 2907 - RNA, 19 nt, Artificial Sequence
  synthetic
uacugaaucuugggcaaaa

SEQ ID NO: 2908 - RNA, 19 nt, Artificial Sequence
  synthetic
acugaaucuugggcaaaag

SEQ ID NO: 2909 - RNA, 19 nt, Artificial Sequence
  synthetic
cugaaucuugggcaaaaga

SEQ ID NO: 2910 - RNA, 19 nt, Artificial Sequence
  synthetic
ugaaucuugggcaaaagaa

SEQ ID NO: 2911 - RNA, 19 nt, Artificial Sequence
  synthetic
gaaucuugggcaaaagaaa

SEQ ID NO: 2912 - RNA, 19 nt, Artificial Sequence
  synthetic
aaucuugggcaaaagaaau

SEQ ID NO: 2913 - RNA, 19 nt, Artificial Sequence
  synthetic
aucuugggcaaaagaaaua

SEQ ID NO: 2914 - RNA, 19 nt, Artificial Sequence
  synthetic
ucuugggcaaaagaaauac

SEQ ID NO: 2915 - RNA, 19 nt, Artificial Sequence
  synthetic
cuugggcaaaagaaauaca

SEQ ID NO: 2916 - RNA, 19 nt, Artificial Sequence
  synthetic
uugggcaaaagaaauacac

SEQ ID NO: 2917 - RNA, 19 nt, Artificial Sequence
  synthetic
ugggcaaaagaaauacacc

SEQ ID NO: 2918 - RNA, 19 nt, Artificial Sequence
  synthetic
gggcaaaagaaauacacca

SEQ ID NO: 2919 - RNA, 19 nt, Artificial Sequence
  synthetic
ggcaaaagaaauacaccaa

SEQ ID NO: 2920 - RNA, 19 nt, Artificial Sequence
  synthetic
gcaaaagaaauacaccaag

SEQ ID NO: 2921 - RNA, 19 nt, Artificial Sequence
  synthetic
caaaagaaauacaccaaga

SEQ ID NO: 2922 - RNA, 19 nt, Artificial Sequence
  synthetic
aaaagaaauacaccaagac

SEQ ID NO: 2923 - RNA, 19 nt, Artificial Sequence
  synthetic
aaagaaauacaccaagaca

SEQ ID NO: 2924 - RNA, 19 nt, Artificial Sequence
  synthetic
aagaaauacaccaagacaa

SEQ ID NO: 2925 - RNA, 19 nt, Artificial Sequence
  synthetic
agaaauacaccaagacaac

SEQ ID NO: 2926 - RNA, 19 nt, Artificial Sequence
  synthetic
gaaauacaccaagacaaca

SEQ ID NO: 2927 - RNA, 19 nt, Artificial Sequence
  synthetic
aaauacaccaagacaacau

SEQ ID NO: 2928 - RNA, 19 nt, Artificial Sequence
  synthetic
aauacaccaagacaacaua

SEQ ID NO: 2929 - RNA, 19 nt, Artificial Sequence
  synthetic
aagacaacauacugguggg

SEQ ID NO: 2930 - RNA, 19 nt, Artificial Sequence
  synthetic
uggugggaugggcuccaau

SEQ ID NO: 2931 - RNA, 19 nt, Artificial Sequence
  synthetic
ggugggaugggcuccaauc

SEQ ID NO: 2932 - RNA, 19 nt, Artificial Sequence
  synthetic
gugggaugggcuccaaucc

SEQ ID NO: 2933 - RNA, 19 nt, Artificial Sequence
  synthetic
ugggaugggcuccaauccu

SEQ ID NO: 2934 - RNA, 19 nt, Artificial Sequence
  synthetic
gggaugggcuccaauccuc

SEQ ID NO: 2935 - RNA, 19 nt, Artificial Sequence
  synthetic
ggaugggcuccaauccucc

SEQ ID NO: 2936 - RNA, 19 nt, Artificial Sequence
  synthetic
gaugggcuccaauccuccg

SEQ ID NO: 2937 - RNA, 19 nt, Artificial Sequence
  synthetic
augggcuccaauccuccga

SEQ ID NO: 2938 - RNA, 19 nt, Artificial Sequence
  synthetic
gacgauuuugcccucauag

SEQ ID NO: 2939 - RNA, 19 nt, Artificial Sequence
  synthetic
gauuuugcccucauaguga

SEQ ID NO: 2940 - RNA, 19 nt, Artificial Sequence
  synthetic
auuuugcccucauagugaa

SEQ ID NO: 2941 - RNA, 19 nt, Artificial Sequence
  synthetic
uuuugcccucauagugaau

SEQ ID NO: 2942 - RNA, 19 nt, Artificial Sequence
  synthetic
uuugcccucauagugaaug

SEQ ID NO: 2943 - RNA, 19 nt, Artificial Sequence
  synthetic
uugcccucauagugaaugc

SEQ ID NO: 2944 - RNA, 19 nt, Artificial Sequence
  synthetic
ugcccucauagugaaugca

SEQ ID NO: 2945 - RNA, 19 nt, Artificial Sequence
  synthetic
gcccucauagugaaugcac

SEQ ID NO: 2946 - RNA, 19 nt, Artificial Sequence
  synthetic
cccucauagugaaugcacc

SEQ ID NO: 2947 - RNA, 19 nt, Artificial Sequence
  synthetic
ccucauagugaaugcacca

SEQ ID NO: 2948 - RNA, 19 nt, Artificial Sequence
  synthetic
cucauagugaaugcaccaa

SEQ ID NO: 2949 - RNA, 19 nt, Artificial Sequence
  synthetic
ucauagugaaugcaccaaa

SEQ ID NO: 2950 - RNA, 19 nt, Artificial Sequence
  synthetic
cauagugaaugcaccaaau

SEQ ID NO: 2951 - RNA, 19 nt, Artificial Sequence
  synthetic
auagugaaugcaccaaauc

SEQ ID NO: 2952 - RNA, 19 nt, Artificial Sequence
  synthetic
uagugaaugcaccaaauca

SEQ ID NO: 2953 - RNA, 19 nt, Artificial Sequence
  synthetic
agugaaugcaccaaaucau

SEQ ID NO: 2954 - RNA, 19 nt, Artificial Sequence
  synthetic
gugaaugcaccaaaucaug

SEQ ID NO: 2955 - RNA, 19 nt, Artificial Sequence
  synthetic
ugaaugcaccaaaucauga

SEQ ID NO: 2956 - RNA, 19 nt, Artificial Sequence
  synthetic
gaaugcaccaaaucaugag

SEQ ID NO: 2957 - RNA, 19 nt, Artificial Sequence
  synthetic
aaugcaccaaaucaugagg

SEQ ID NO: 2958 - RNA, 19 nt, Artificial Sequence
  synthetic
augcaccaaaucaugaggg

SEQ ID NO: 2959 - RNA, 19 nt, Artificial Sequence
  synthetic
ugcaccaaaucaugaggga

SEQ ID NO: 2960 - RNA, 19 nt, Artificial Sequence
  synthetic
gcaccaaaucaugagggaa

SEQ ID NO: 2961 - RNA, 19 nt, Artificial Sequence
  synthetic
caccaaaucaugagggaau

SEQ ID NO: 2962 - RNA, 19 nt, Artificial Sequence
  synthetic
accaaaucaugagggaaua

SEQ ID NO: 2963 - RNA, 19 nt, Artificial Sequence
  synthetic
ccaaaucaugagggaauac

SEQ ID NO: 2964 - RNA, 19 nt, Artificial Sequence
  synthetic
caaaucaugagggaauaca

SEQ ID NO: 2965 - RNA, 19 nt, Artificial Sequence
  synthetic
aaaucaugagggaauacaa

SEQ ID NO: 2966 - RNA, 19 nt, Artificial Sequence
  synthetic
aaucaugagggaauacaag

SEQ ID NO: 2967 - RNA, 19 nt, Artificial Sequence
  synthetic
aucaugagggaauacaagc

SEQ ID NO: 2968 - RNA, 19 nt, Artificial Sequence
  synthetic
ucaugagggaauacaagca

SEQ ID NO: 2969 - RNA, 19 nt, Artificial Sequence
  synthetic
caugagggaauacaagcag

SEQ ID NO: 2970 - RNA, 19 nt, Artificial Sequence
  synthetic
augagggaauacaagcagg

SEQ ID NO: 2971 - RNA, 19 nt, Artificial Sequence
  synthetic
ugagggaauacaagcagga

SEQ ID NO: 2972 - RNA, 19 nt, Artificial Sequence
  synthetic
gagggaauacaagcaggag

SEQ ID NO: 2973 - RNA, 19 nt, Artificial Sequence
  synthetic
agggaauacaagcaggagu

SEQ ID NO: 2974 - RNA, 19 nt, Artificial Sequence
  synthetic
gggaauacaagcaggagug

SEQ ID NO: 2975 - RNA, 19 nt, Artificial Sequence
  synthetic
ggaauacaagcaggagugg

SEQ ID NO: 2976 - RNA, 19 nt, Artificial Sequence
  synthetic
gaauacaagcaggagugga

SEQ ID NO: 2977 - RNA, 19 nt, Artificial Sequence
  synthetic
aauacaagcaggaguggau

SEQ ID NO: 2978 - RNA, 19 nt, Artificial Sequence
  synthetic
auacaagcaggaguggaua

SEQ ID NO: 2979 - RNA, 19 nt, Artificial Sequence
  synthetic
uacaagcaggaguggauag

SEQ ID NO: 2980 - RNA, 19 nt, Artificial Sequence
  synthetic
acaagcaggaguggauaga

SEQ ID NO: 2981 - RNA, 19 nt, Artificial Sequence
  synthetic
caagcaggaguggauagau

SEQ ID NO: 2982 - RNA, 19 nt, Artificial Sequence
  synthetic
aagcaggaguggauagauu

SEQ ID NO: 2983 - RNA, 19 nt, Artificial Sequence
  synthetic
agcaggaguggauagauuc

SEQ ID NO: 2984 - RNA, 19 nt, Artificial Sequence
  synthetic
gcaggaguggauagauucu

SEQ ID NO: 2985 - RNA, 19 nt, Artificial Sequence
  synthetic
caggaguggauagauucua

SEQ ID NO: 2986 - RNA, 19 nt, Artificial Sequence
  synthetic
aggaguggauagauucuac

SEQ ID NO: 2987 - RNA, 19 nt, Artificial Sequence
  synthetic
ggaguggauagauucuaca

SEQ ID NO: 2988 - RNA, 19 nt, Artificial Sequence
  synthetic
gaguggauagauucuacag

SEQ ID NO: 2989 - RNA, 19 nt, Artificial Sequence
  synthetic
aguggauagauucuacagg

SEQ ID NO: 2990 - RNA, 19 nt, Artificial Sequence
  synthetic
guggauagauucuacagga

SEQ ID NO: 2991 - RNA, 19 nt, Artificial Sequence
  synthetic
accugcaaguuggugggaa

SEQ ID NO: 2992 - RNA, 19 nt, Artificial Sequence
  synthetic
gugggaaucaacaugagca

SEQ ID NO: 2993 - RNA, 19 nt, Artificial Sequence
  synthetic
ugggaaucaacaugagcaa

SEQ ID NO: 2994 - RNA, 19 nt, Artificial Sequence
  synthetic
gggaaucaacaugagcaaa

SEQ ID NO: 2995 - RNA, 19 nt, Artificial Sequence
  synthetic
ggaaucaacaugagcaaaa

SEQ ID NO: 2996 - RNA, 19 nt, Artificial Sequence
  synthetic
gaaucaacaugagcaaaaa

SEQ ID NO: 2997 - RNA, 19 nt, Artificial Sequence
  synthetic
aaucaacaugagcaaaaag

SEQ ID NO: 2998 - RNA, 19 nt, Artificial Sequence
  synthetic
aucaacaugagcaaaaaga

SEQ ID NO: 2999 - RNA, 19 nt, Artificial Sequence
  synthetic
ucaacaugagcaaaaagaa

SEQ ID NO: 3000 - RNA, 19 nt, Artificial Sequence
  synthetic
caacaugagcaaaaagaag

SEQ ID NO: 3001 - RNA, 19 nt, Artificial Sequence
  synthetic
aacaugagcaaaaagaagu

SEQ ID NO: 3002 - RNA, 19 nt, Artificial Sequence
  synthetic
acaugagcaaaaagaaguc

SEQ ID NO: 3003 - RNA, 19 nt, Artificial Sequence
  synthetic
caugagcaaaaagaagucc

SEQ ID NO: 3004 - RNA, 19 nt, Artificial Sequence
  synthetic
augagcaaaaagaaguccu

SEQ ID NO: 3005 - RNA, 19 nt, Artificial Sequence
  synthetic
ugagcaaaaagaaguccua

SEQ ID NO: 3006 - RNA, 19 nt, Artificial Sequence
  synthetic
gagcaaaaagaaguccuau

SEQ ID NO: 3007 - RNA, 19 nt, Artificial Sequence
  synthetic
agcaaaaagaaguccuaua

SEQ ID NO: 3008 - RNA, 19 nt, Artificial Sequence
  synthetic
gcaaaaagaaguccuauau

SEQ ID NO: 3009 - RNA, 19 nt, Artificial Sequence
  synthetic
caaaaagaaguccuauaua

SEQ ID NO: 3010 - RNA, 19 nt, Artificial Sequence
  synthetic
aaaaagaaguccuauauaa

SEQ ID NO: 3011 - RNA, 19 nt, Artificial Sequence
  synthetic
aaaagaaguccuauauaaa

SEQ ID NO: 3012 - RNA, 19 nt, Artificial Sequence
  synthetic
aaagaaguccuauauaaau

SEQ ID NO: 3013 - RNA, 19 nt, Artificial Sequence
  synthetic
aagaaguccuauauaaaua

SEQ ID NO: 3014 - RNA, 19 nt, Artificial Sequence
  synthetic
agaaguccuauauaaauaa

SEQ ID NO: 3015 - RNA, 19 nt, Artificial Sequence
  synthetic
gaaguccuauauaaauaaa

SEQ ID NO: 3016 - RNA, 19 nt, Artificial Sequence
  synthetic
aaguccuauauaaauaaaa

SEQ ID NO: 3017 - RNA, 19 nt, Artificial Sequence
  synthetic
aguccuauauaaauaaaac

SEQ ID NO: 3018 - RNA, 19 nt, Artificial Sequence
  synthetic
guccuauauaaauaaaaca

SEQ ID NO: 3019 - RNA, 19 nt, Artificial Sequence
  synthetic
uccuauauaaauaaaacag

SEQ ID NO: 3020 - RNA, 19 nt, Artificial Sequence
  synthetic
ccuauauaaauaaaacagg

SEQ ID NO: 3021 - RNA, 19 nt, Artificial Sequence
  synthetic
acaggaacauuugaauuca

SEQ ID NO: 3022 - RNA, 19 nt, Artificial Sequence
  synthetic
acauuugaauucacaagcu

SEQ ID NO: 3023 - RNA, 19 nt, Artificial Sequence
  synthetic
cauuugaauucacaagcuu

SEQ ID NO: 3024 - RNA, 19 nt, Artificial Sequence
  synthetic
auuugaauucacaagcuuu

SEQ ID NO: 3025 - RNA, 19 nt, Artificial Sequence
  synthetic
uuugaauucacaagcuuuu

SEQ ID NO: 3026 - RNA, 19 nt, Artificial Sequence
  synthetic
uugaauucacaagcuuuuu

SEQ ID NO: 3027 - RNA, 19 nt, Artificial Sequence
  synthetic
ugaauucacaagcuuuuuu

SEQ ID NO: 3028 - RNA, 19 nt, Artificial Sequence
  synthetic
gaauucacaagcuuuuuuu

SEQ ID NO: 3029 - RNA, 19 nt, Artificial Sequence
  synthetic
aauucacaagcuuuuuuua

SEQ ID NO: 3030 - RNA, 19 nt, Artificial Sequence
  synthetic
auucacaagcuuuuuuuau

SEQ ID NO: 3031 - RNA, 19 nt, Artificial Sequence
  synthetic
uucacaagcuuuuuuuauc

SEQ ID NO: 3032 - RNA, 19 nt, Artificial Sequence
  synthetic
ucacaagcuuuuuuuaucg

SEQ ID NO: 3033 - RNA, 19 nt, Artificial Sequence
  synthetic
acaagcuuuuuuuaucgcu

SEQ ID NO: 3034 - RNA, 19 nt, Artificial Sequence
  synthetic
uauggauuuguggcuaauu

SEQ ID NO: 3035 - RNA, 19 nt, Artificial Sequence
  synthetic
auggauuuguggcuaauuu

SEQ ID NO: 3036 - RNA, 19 nt, Artificial Sequence
  synthetic
uggauuuguggcuaauuuu

SEQ ID NO: 3037 - RNA, 19 nt, Artificial Sequence
  synthetic
ggauuuguggcuaauuuua

SEQ ID NO: 3038 - RNA, 19 nt, Artificial Sequence
  synthetic
gauuuguggcuaauuuuag

SEQ ID NO: 3039 - RNA, 19 nt, Artificial Sequence
  synthetic
auuuguggcuaauuuuagc

SEQ ID NO: 3040 - RNA, 19 nt, Artificial Sequence
  synthetic
uuuguggcuaauuuuagca

SEQ ID NO: 3041 - RNA, 19 nt, Artificial Sequence
  synthetic
uuguggcuaauuuuagcau

SEQ ID NO: 3042 - RNA, 19 nt, Artificial Sequence
  synthetic
uguggcuaauuuuagcaug

SEQ ID NO: 3043 - RNA, 19 nt, Artificial Sequence
  synthetic
guggcuaauuuuagcaugg

SEQ ID NO: 3044 - RNA, 19 nt, Artificial Sequence
  synthetic
uggcuaauuuuagcaugga

SEQ ID NO: 3045 - RNA, 19 nt, Artificial Sequence
  synthetic
ggcuaauuuuagcauggag

SEQ ID NO: 3046 - RNA, 19 nt, Artificial Sequence
  synthetic
gcuaauuuuagcauggagc

SEQ ID NO: 3047 - RNA, 19 nt, Artificial Sequence
  synthetic
cuaauuuuagcauggagcu

SEQ ID NO: 3048 - RNA, 19 nt, Artificial Sequence
  synthetic
uuuagcauggagcugccca

SEQ ID NO: 3049 - RNA, 19 nt, Artificial Sequence
  synthetic
cccaguuuuggagugucug

SEQ ID NO: 3050 - RNA, 19 nt, Artificial Sequence
  synthetic
ccaguuuuggagugucugg

SEQ ID NO: 3051 - RNA, 19 nt, Artificial Sequence
  synthetic
caguuuuggagugucugga

SEQ ID NO: 3052 - RNA, 19 nt, Artificial Sequence
  synthetic
aguuuuggagugucuggaa

SEQ ID NO: 3053 - RNA, 19 nt, Artificial Sequence
  synthetic
guuuuggagugucuggaau

SEQ ID NO: 3054 - RNA, 19 nt, Artificial Sequence
  synthetic
uuuuggagugucuggaaua

SEQ ID NO: 3055 - RNA, 19 nt, Artificial Sequence
  synthetic
uuuggagugucuggaauaa

SEQ ID NO: 3056 - RNA, 19 nt, Artificial Sequence
  synthetic
uuggagugucuggaauaaa

SEQ ID NO: 3057 - RNA, 19 nt, Artificial Sequence
  synthetic
auaaaugagucagcugaua

SEQ ID NO: 3058 - RNA, 19 nt, Artificial Sequence
  synthetic
gagucagcugauaugagca

SEQ ID NO: 3059 - RNA, 19 nt, Artificial Sequence
  synthetic
agucagcugauaugagcau

SEQ ID NO: 3060 - RNA, 19 nt, Artificial Sequence
  synthetic
gucagcugauaugagcauu

SEQ ID NO: 3061 - RNA, 19 nt, Artificial Sequence
  synthetic
ucagcugauaugagcauug

SEQ ID NO: 3062 - RNA, 19 nt, Artificial Sequence
  synthetic
cagcugauaugagcauugg

SEQ ID NO: 3063 - RNA, 19 nt, Artificial Sequence
  synthetic
agcugauaugagcauugga

SEQ ID NO: 3064 - RNA, 19 nt, Artificial Sequence
  synthetic
gcugauaugagcauuggag

SEQ ID NO: 3065 - RNA, 19 nt, Artificial Sequence
  synthetic
cugauaugagcauuggagu

SEQ ID NO: 3066 - RNA, 19 nt, Artificial Sequence
  synthetic
ugauaugagcauuggagua

SEQ ID NO: 3067 - RNA, 19 nt, Artificial Sequence
  synthetic
gauaugagcauuggaguaa

SEQ ID NO: 3068 - RNA, 19 nt, Artificial Sequence
  synthetic
auaugagcauuggaguaac

SEQ ID NO: 3069 - RNA, 19 nt, Artificial Sequence
  synthetic
uaugagcauuggaguaaca

SEQ ID NO: 3070 - RNA, 19 nt, Artificial Sequence
  synthetic
augagcauuggaguaacag

SEQ ID NO: 3071 - RNA, 19 nt, Artificial Sequence
  synthetic
ugagcauuggaguaacagu

SEQ ID NO: 3072 - RNA, 19 nt, Artificial Sequence
  synthetic
gagcauuggaguaacagug

SEQ ID NO: 3073 - RNA, 19 nt, Artificial Sequence
  synthetic
agcauuggaguaacaguga

SEQ ID NO: 3074 - RNA, 19 nt, Artificial Sequence
  synthetic
gcauuggaguaacagugau

SEQ ID NO: 3075 - RNA, 19 nt, Artificial Sequence
  synthetic
cauuggaguaacagugaua

SEQ ID NO: 3076 - RNA, 19 nt, Artificial Sequence
  synthetic
auuggaguaacagugauaa

SEQ ID NO: 3077 - RNA, 19 nt, Artificial Sequence
  synthetic
uuggaguaacagugauaaa

SEQ ID NO: 3078 - RNA, 19 nt, Artificial Sequence
  synthetic
uggaguaacagugauaaag

SEQ ID NO: 3079 - RNA, 19 nt, Artificial Sequence
  synthetic
ggaguaacagugauaaaga

SEQ ID NO: 3080 - RNA, 19 nt, Artificial Sequence
  synthetic
gaguaacagugauaaagaa

SEQ ID NO: 3081 - RNA, 19 nt, Artificial Sequence
  synthetic
aguaacagugauaaagaac

SEQ ID NO: 3082 - RNA, 19 nt, Artificial Sequence
  synthetic
guaacagugauaaagaaca

SEQ ID NO: 3083 - RNA, 19 nt, Artificial Sequence
  synthetic
uaacagugauaaagaacaa

SEQ ID NO: 3084 - RNA, 19 nt, Artificial Sequence
  synthetic
aacagugauaaagaacaac

SEQ ID NO: 3085 - RNA, 19 nt, Artificial Sequence
  synthetic
acagugauaaagaacaaca

SEQ ID NO: 3086 - RNA, 19 nt, Artificial Sequence
  synthetic
cagugauaaagaacaacau

SEQ ID NO: 3087 - RNA, 19 nt, Artificial Sequence
  synthetic
agugauaaagaacaacaug

SEQ ID NO: 3088 - RNA, 19 nt, Artificial Sequence
  synthetic
gugauaaagaacaacauga

SEQ ID NO: 3089 - RNA, 19 nt, Artificial Sequence
  synthetic
ugauaaagaacaacaugau

SEQ ID NO: 3090 - RNA, 19 nt, Artificial Sequence
  synthetic
gauaaagaacaacaugaua

SEQ ID NO: 3091 - RNA, 19 nt, Artificial Sequence
  synthetic
auaaagaacaacaugauaa

SEQ ID NO: 3092 - RNA, 19 nt, Artificial Sequence
  synthetic
uaaagaacaacaugauaaa

SEQ ID NO: 3093 - RNA, 19 nt, Artificial Sequence
  synthetic
aaagaacaacaugauaaac

SEQ ID NO: 3094 - RNA, 19 nt, Artificial Sequence
  synthetic
aagaacaacaugauaaaca

SEQ ID NO: 3095 - RNA, 19 nt, Artificial Sequence
  synthetic
agaacaacaugauaaacaa

SEQ ID NO: 3096 - RNA, 19 nt, Artificial Sequence
  synthetic
gaacaacaugauaaacaau

SEQ ID NO: 3097 - RNA, 19 nt, Artificial Sequence
  synthetic
aacaacaugauaaacaaug

SEQ ID NO: 3098 - RNA, 19 nt, Artificial Sequence
  synthetic
acaacaugauaaacaauga

SEQ ID NO: 3099 - RNA, 19 nt, Artificial Sequence
  synthetic
caacaugauaaacaaugac

SEQ ID NO: 3100 - RNA, 19 nt, Artificial Sequence
  synthetic
aacaugauaaacaaugacc

SEQ ID NO: 3101 - RNA, 19 nt, Artificial Sequence
  synthetic
acaugauaaacaaugaccu

SEQ ID NO: 3102 - RNA, 19 nt, Artificial Sequence
  synthetic
caugauaaacaaugaccuu

SEQ ID NO: 3103 - RNA, 19 nt, Artificial Sequence
  synthetic
augauaaacaaugaccuug

SEQ ID NO: 3104 - RNA, 19 nt, Artificial Sequence
  synthetic
ugauaaacaaugaccuugg

SEQ ID NO: 3105 - RNA, 19 nt, Artificial Sequence
  synthetic
gauaaacaaugaccuugga

SEQ ID NO: 3106 - RNA, 19 nt, Artificial Sequence
  synthetic
auaaacaaugaccuuggac

SEQ ID NO: 3107 - RNA, 19 nt, Artificial Sequence
  synthetic
uaaacaaugaccuuggacc

SEQ ID NO: 3108 - RNA, 19 nt, Artificial Sequence
  synthetic
aaacaaugaccuuggacca

SEQ ID NO: 3109 - RNA, 19 nt, Artificial Sequence
  synthetic
aacaaugaccuuggaccag

SEQ ID NO: 3110 - RNA, 19 nt, Artificial Sequence
  synthetic
acaaugaccuuggaccagc

SEQ ID NO: 3111 - RNA, 19 nt, Artificial Sequence
  synthetic
caaugaccuuggaccagca

SEQ ID NO: 3112 - RNA, 19 nt, Artificial Sequence
  synthetic
aaugaccuuggaccagcaa

SEQ ID NO: 3113 - RNA, 19 nt, Artificial Sequence
  synthetic
augaccuuggaccagcaac

SEQ ID NO: 3114 - RNA, 19 nt, Artificial Sequence
  synthetic
ugaccuuggaccagcaaca

SEQ ID NO: 3115 - RNA, 19 nt, Artificial Sequence
  synthetic
gaccuuggaccagcaacag

SEQ ID NO: 3116 - RNA, 19 nt, Artificial Sequence
  synthetic
accuuggaccagcaacagc

SEQ ID NO: 3117 - RNA, 19 nt, Artificial Sequence
  synthetic
ccuuggaccagcaacagcc

SEQ ID NO: 3118 - RNA, 19 nt, Artificial Sequence
  synthetic
cuuggaccagcaacagccc

SEQ ID NO: 3119 - RNA, 19 nt, Artificial Sequence
  synthetic
uuggaccagcaacagccca

SEQ ID NO: 3120 - RNA, 19 nt, Artificial Sequence
  synthetic
uggaccagcaacagcccag

SEQ ID NO: 3121 - RNA, 19 nt, Artificial Sequence
  synthetic
ggaccagcaacagcccaga

SEQ ID NO: 3122 - RNA, 19 nt, Artificial Sequence
  synthetic
gaccagcaacagcccagau

SEQ ID NO: 3123 - RNA, 19 nt, Artificial Sequence
  synthetic
accagcaacagcccagaug

SEQ ID NO: 3124 - RNA, 19 nt, Artificial Sequence
  synthetic
ccagcaacagcccagaugg

SEQ ID NO: 3125 - RNA, 19 nt, Artificial Sequence
  synthetic
cagcaacagcccagauggc

SEQ ID NO: 3126 - RNA, 19 nt, Artificial Sequence
  synthetic
agcaacagcccagauggcu

SEQ ID NO: 3127 - RNA, 19 nt, Artificial Sequence
  synthetic
gcaacagcccagauggcuc

SEQ ID NO: 3128 - RNA, 19 nt, Artificial Sequence
  synthetic
caacagcccagauggcucu

SEQ ID NO: 3129 - RNA, 19 nt, Artificial Sequence
  synthetic
gcucuucaauuguucauca

SEQ ID NO: 3130 - RNA, 19 nt, Artificial Sequence
  synthetic
caauuguucaucaaagacu

SEQ ID NO: 3131 - RNA, 19 nt, Artificial Sequence
  synthetic
aauuguucaucaaagacua

SEQ ID NO: 3132 - RNA, 19 nt, Artificial Sequence
  synthetic
auuguucaucaaagacuac

SEQ ID NO: 3133 - RNA, 19 nt, Artificial Sequence
  synthetic
uuguucaucaaagacuaca

SEQ ID NO: 3134 - RNA, 19 nt, Artificial Sequence
  synthetic
uguucaucaaagacuacag

SEQ ID NO: 3135 - RNA, 19 nt, Artificial Sequence
  synthetic
guucaucaaagacuacaga

SEQ ID NO: 3136 - RNA, 19 nt, Artificial Sequence
  synthetic
uucaucaaagacuacagau

SEQ ID NO: 3137 - RNA, 19 nt, Artificial Sequence
  synthetic
ucaucaaagacuacagaua

SEQ ID NO: 3138 - RNA, 19 nt, Artificial Sequence
  synthetic
caucaaagacuacagauau

SEQ ID NO: 3139 - RNA, 19 nt, Artificial Sequence
  synthetic
aucaaagacuacagauaua

SEQ ID NO: 3140 - RNA, 19 nt, Artificial Sequence
  synthetic
ucaaagacuacagauauac

SEQ ID NO: 3141 - RNA, 19 nt, Artificial Sequence
  synthetic
caaagacuacagauauaca

SEQ ID NO: 3142 - RNA, 19 nt, Artificial Sequence
  synthetic
aaagacuacagauauacau

SEQ ID NO: 3143 - RNA, 19 nt, Artificial Sequence
  synthetic
aagacuacagauauacaua

SEQ ID NO: 3144 - RNA, 19 nt, Artificial Sequence
  synthetic
agacuacagauauacauau

SEQ ID NO: 3145 - RNA, 19 nt, Artificial Sequence
  synthetic
gacuacagauauacauaua

SEQ ID NO: 3146 - RNA, 19 nt, Artificial Sequence
  synthetic
acuacagauauacauauag

SEQ ID NO: 3147 - RNA, 19 nt, Artificial Sequence
  synthetic
cuacagauauacauauagg

SEQ ID NO: 3148 - RNA, 19 nt, Artificial Sequence
  synthetic
uacagauauacauauaggu

SEQ ID NO: 3149 - RNA, 19 nt, Artificial Sequence
  synthetic
acagauauacauauaggug

SEQ ID NO: 3150 - RNA, 19 nt, Artificial Sequence
  synthetic
cagauauacauauaggugc

SEQ ID NO: 3151 - RNA, 19 nt, Artificial Sequence
  synthetic
agauauacauauaggugcc

SEQ ID NO: 3152 - RNA, 19 nt, Artificial Sequence
  synthetic
gauauacauauaggugcca

SEQ ID NO: 3153 - RNA, 19 nt, Artificial Sequence
  synthetic
auauacauauaggugccau

SEQ ID NO: 3154 - RNA, 19 nt, Artificial Sequence
  synthetic
uauacauauaggugccaua

SEQ ID NO: 3155 - RNA, 19 nt, Artificial Sequence
  synthetic
auacauauaggugccauag

SEQ ID NO: 3156 - RNA, 19 nt, Artificial Sequence
  synthetic
uauaggugccauagaggag

SEQ ID NO: 3157 - RNA, 19 nt, Artificial Sequence
  synthetic
agaggagacacacaaauuc

SEQ ID NO: 3158 - RNA, 19 nt, Artificial Sequence
  synthetic
gaggagacacacaaauuca

SEQ ID NO: 3159 - RNA, 19 nt, Artificial Sequence
  synthetic
ggagacacacaaauucaga

SEQ ID NO: 3160 - RNA, 19 nt, Artificial Sequence
  synthetic
gagacacacaaauucagac

SEQ ID NO: 3161 - RNA, 19 nt, Artificial Sequence
  synthetic
agacacacaaauucagacg

SEQ ID NO: 3162 - RNA, 19 nt, Artificial Sequence
  synthetic
gacacacaaauucagacga

SEQ ID NO: 3163 - RNA, 19 nt, Artificial Sequence
  synthetic
acacacaaauucagacgag

SEQ ID NO: 3164 - RNA, 19 nt, Artificial Sequence
  synthetic
cacacaaauucagacgaga

SEQ ID NO: 3165 - RNA, 19 nt, Artificial Sequence
  synthetic
acacaaauucagacgagaa

SEQ ID NO: 3166 - RNA, 19 nt, Artificial Sequence
  synthetic
cacaaauucagacgagaag

SEQ ID NO: 3167 - RNA, 19 nt, Artificial Sequence
  synthetic
acaaauucagacgagaaga

SEQ ID NO: 3168 - RNA, 19 nt, Artificial Sequence
  synthetic
caaauucagacgagaagau

SEQ ID NO: 3169 - RNA, 19 nt, Artificial Sequence
  synthetic
aaauucagacgagaagauc

SEQ ID NO: 3170 - RNA, 19 nt, Artificial Sequence
  synthetic
aauucagacgagaagauca

SEQ ID NO: 3171 - RNA, 19 nt, Artificial Sequence
  synthetic
auucagacgagaagaucau

SEQ ID NO: 3172 - RNA, 19 nt, Artificial Sequence
  synthetic
uucagacgagaagaucauu

SEQ ID NO: 3173 - RNA, 19 nt, Artificial Sequence
  synthetic
ucagacgagaagaucauuc

SEQ ID NO: 3174 - RNA, 19 nt, Artificial Sequence
  synthetic
cagacgagaagaucauucg

SEQ ID NO: 3175 - RNA, 19 nt, Artificial Sequence
  synthetic
agacgagaagaucauucga

SEQ ID NO: 3176 - RNA, 19 nt, Artificial Sequence
  synthetic
gacgagaagaucauucgag

SEQ ID NO: 3177 - RNA, 19 nt, Artificial Sequence
  synthetic
acgagaagaucauucgagc

SEQ ID NO: 3178 - RNA, 19 nt, Artificial Sequence
  synthetic
cgagaagaucauucgagcu

SEQ ID NO: 3179 - RNA, 19 nt, Artificial Sequence
  synthetic
gagaagaucauucgagcua

SEQ ID NO: 3180 - RNA, 19 nt, Artificial Sequence
  synthetic
agaagaucauucgagcuaa

SEQ ID NO: 3181 - RNA, 19 nt, Artificial Sequence
  synthetic
gaagaucauucgagcuaaa

SEQ ID NO: 3182 - RNA, 19 nt, Artificial Sequence
  synthetic
aagaucauucgagcuaaag

SEQ ID NO: 3183 - RNA, 19 nt, Artificial Sequence
  synthetic
agaucauucgagcuaaaga

SEQ ID NO: 3184 - RNA, 19 nt, Artificial Sequence
  synthetic
gaucauucgagcuaaagaa

SEQ ID NO: 3185 - RNA, 19 nt, Artificial Sequence
  synthetic
aucauucgagcuaaagaag

SEQ ID NO: 3186 - RNA, 19 nt, Artificial Sequence
  synthetic
ucauucgagcuaaagaagc

SEQ ID NO: 3187 - RNA, 19 nt, Artificial Sequence
  synthetic
cauucgagcuaaagaagcu

SEQ ID NO: 3188 - RNA, 19 nt, Artificial Sequence
  synthetic
auucgagcuaaagaagcug

SEQ ID NO: 3189 - RNA, 19 nt, Artificial Sequence
  synthetic
uucgagcuaaagaagcugu

SEQ ID NO: 3190 - RNA, 19 nt, Artificial Sequence
  synthetic
ucgagcuaaagaagcugug

SEQ ID NO: 3191 - RNA, 19 nt, Artificial Sequence
  synthetic
cgagcuaaagaagcugugg

SEQ ID NO: 3192 - RNA, 19 nt, Artificial Sequence
  synthetic
gagcuaaagaagcuguggg

SEQ ID NO: 3193 - RNA, 19 nt, Artificial Sequence
  synthetic
agcuaaagaagcuguggga

SEQ ID NO: 3194 - RNA, 19 nt, Artificial Sequence
  synthetic
gcuaaagaagcugugggau

SEQ ID NO: 3195 - RNA, 19 nt, Artificial Sequence
  synthetic
cuaaagaagcugugggauc

SEQ ID NO: 3196 - RNA, 19 nt, Artificial Sequence
  synthetic
uaaagaagcugugggauca

SEQ ID NO: 3197 - RNA, 19 nt, Artificial Sequence
  synthetic
aaagaagcugugggaucaa

SEQ ID NO: 3198 - RNA, 19 nt, Artificial Sequence
  synthetic
aagaagcugugggaucaaa

SEQ ID NO: 3199 - RNA, 19 nt, Artificial Sequence
  synthetic
agaagcugugggaucaaac

SEQ ID NO: 3200 - RNA, 19 nt, Artificial Sequence
  synthetic
gaagcugugggaucaaacc

SEQ ID NO: 3201 - RNA, 19 nt, Artificial Sequence
  synthetic
aagcugugggaucaaaccc

SEQ ID NO: 3202 - RNA, 19 nt, Artificial Sequence
  synthetic
agcugugggaucaaaccca

SEQ ID NO: 3203 - RNA, 19 nt, Artificial Sequence
  synthetic
gcugugggaucaaacccaa

SEQ ID NO: 3204 - RNA, 19 nt, Artificial Sequence
  synthetic
cugugggaucaaacccaau

SEQ ID NO: 3205 - RNA, 19 nt, Artificial Sequence
  synthetic
ugugggaucaaacccaauc

SEQ ID NO: 3206 - RNA, 19 nt, Artificial Sequence
  synthetic
gugggaucaaacccaauca

SEQ ID NO: 3207 - RNA, 19 nt, Artificial Sequence
  synthetic
ugggaucaaacccaaucaa

SEQ ID NO: 3208 - RNA, 19 nt, Artificial Sequence
  synthetic
acccaaucaaaggcaggac

SEQ ID NO: 3209 - RNA, 19 nt, Artificial Sequence
  synthetic
cuauugguaucagauggag

SEQ ID NO: 3210 - RNA, 19 nt, Artificial Sequence
  synthetic
ggaccaaacuuauacaaca

SEQ ID NO: 3211 - RNA, 19 nt, Artificial Sequence
  synthetic
auccggaaucuucacauuc

SEQ ID NO: 3212 - RNA, 19 nt, Artificial Sequence
  synthetic
cccgaagucugcuuaaagu

SEQ ID NO: 3213 - RNA, 19 nt, Artificial Sequence
  synthetic
gaagucugcuuaaaguggg

SEQ ID NO: 3214 - RNA, 19 nt, Artificial Sequence
  synthetic
aagucugcuuaaaguggga

SEQ ID NO: 3215 - RNA, 19 nt, Artificial Sequence
  synthetic
agucugcuuaaagugggag

SEQ ID NO: 3216 - RNA, 19 nt, Artificial Sequence
  synthetic
gucugcuuaaagugggagc

SEQ ID NO: 3217 - RNA, 19 nt, Artificial Sequence
  synthetic
ucugcuuaaagugggagcu

SEQ ID NO: 3218 - RNA, 19 nt, Artificial Sequence
  synthetic
cugcuuaaagugggagcua

SEQ ID NO: 3219 - RNA, 19 nt, Artificial Sequence
  synthetic
ugcuuaaagugggagcuaa

SEQ ID NO: 3220 - RNA, 19 nt, Artificial Sequence
  synthetic
gcuuaaagugggagcuaau

SEQ ID NO: 3221 - RNA, 19 nt, Artificial Sequence
  synthetic
cuuaaagugggagcuaaug

SEQ ID NO: 3222 - RNA, 19 nt, Artificial Sequence
  synthetic
uuaaagugggagcuaaugg

SEQ ID NO: 3223 - RNA, 19 nt, Artificial Sequence
  synthetic
uaaagugggagcuaaugga

SEQ ID NO: 3224 - RNA, 19 nt, Artificial Sequence
  synthetic
aaagugggagcuaauggau

SEQ ID NO: 3225 - RNA, 19 nt, Artificial Sequence
  synthetic
aagugggagcuaauggaug

SEQ ID NO: 3226 - RNA, 19 nt, Artificial Sequence
  synthetic
agugggagcuaauggauga

SEQ ID NO: 3227 - RNA, 19 nt, Artificial Sequence
  synthetic
gugggagcuaauggaugag

SEQ ID NO: 3228 - RNA, 19 nt, Artificial Sequence
  synthetic
ugggagcuaauggaugagg

SEQ ID NO: 3229 - RNA, 19 nt, Artificial Sequence
  synthetic
gauuaucggggaagacuuu

SEQ ID NO: 3230 - RNA, 19 nt, Artificial Sequence
  synthetic
uguaauccccugaaucccu

SEQ ID NO: 3231 - RNA, 19 nt, Artificial Sequence
  synthetic
aaucccuuugucagccaua

SEQ ID NO: 3232 - RNA, 19 nt, Artificial Sequence
  synthetic
aucccuuugucagccauaa

SEQ ID NO: 3233 - RNA, 19 nt, Artificial Sequence
  synthetic
ucccuuugucagccauaaa

SEQ ID NO: 3234 - RNA, 19 nt, Artificial Sequence
  synthetic
cccuuugucagccauaaag

SEQ ID NO: 3235 - RNA, 19 nt, Artificial Sequence
  synthetic
ccuuugucagccauaaaga

SEQ ID NO: 3236 - RNA, 19 nt, Artificial Sequence
  synthetic
uuugucagccauaaagaga

SEQ ID NO: 3237 - RNA, 19 nt, Artificial Sequence
  synthetic
auugagucuguaaacaaug

SEQ ID NO: 3238 - RNA, 19 nt, Artificial Sequence
  synthetic
ucuguaaacaaugcuguag

SEQ ID NO: 3239 - RNA, 19 nt, Artificial Sequence
  synthetic
cuguaaacaaugcuguagu

SEQ ID NO: 3240 - RNA, 19 nt, Artificial Sequence
  synthetic
uguaaacaaugcuguagug

SEQ ID NO: 3241 - RNA, 19 nt, Artificial Sequence
  synthetic
guaaacaaugcuguaguga

SEQ ID NO: 3242 - RNA, 19 nt, Artificial Sequence
  synthetic
uaaacaaugcuguagugau

SEQ ID NO: 3243 - RNA, 19 nt, Artificial Sequence
  synthetic
aaacaaugcuguagugaug

SEQ ID NO: 3244 - RNA, 19 nt, Artificial Sequence
  synthetic
aacaaugcuguagugaugc

SEQ ID NO: 3245 - RNA, 19 nt, Artificial Sequence
  synthetic
acaaugcuguagugaugcc

SEQ ID NO: 3246 - RNA, 19 nt, Artificial Sequence
  synthetic
caaugcuguagugaugcca

SEQ ID NO: 3247 - RNA, 19 nt, Artificial Sequence
  synthetic
aaugcuguagugaugccag

SEQ ID NO: 3248 - RNA, 19 nt, Artificial Sequence
  synthetic
augcuguagugaugccagc

SEQ ID NO: 3249 - RNA, 19 nt, Artificial Sequence
  synthetic
ugcuguagugaugccagcc

SEQ ID NO: 3250 - RNA, 19 nt, Artificial Sequence
  synthetic
gcuguagugaugccagccc

SEQ ID NO: 3251 - RNA, 19 nt, Artificial Sequence
  synthetic
cuguagugaugccagccca

SEQ ID NO: 3252 - RNA, 19 nt, Artificial Sequence
  synthetic
uguagugaugccagcccau

SEQ ID NO: 3253 - RNA, 19 nt, Artificial Sequence
  synthetic
guagugaugccagcccaug

SEQ ID NO: 3254 - RNA, 19 nt, Artificial Sequence
  synthetic
uagugaugccagcccaugg

SEQ ID NO: 3255 - RNA, 19 nt, Artificial Sequence
  synthetic
agugaugccagcccauggu

SEQ ID NO: 3256 - RNA, 19 nt, Artificial Sequence
  synthetic
gugaugccagcccaugguc

SEQ ID NO: 3257 - RNA, 19 nt, Artificial Sequence
  synthetic
ugaugccagcccauggucc

SEQ ID NO: 3258 - RNA, 19 nt, Artificial Sequence
  synthetic
augccagcccaugguccag

SEQ ID NO: 3259 - RNA, 19 nt, Artificial Sequence
  synthetic
ugccagcccaugguccagc

SEQ ID NO: 3260 - RNA, 19 nt, Artificial Sequence
  synthetic
gccagcccaugguccagcc

SEQ ID NO: 3261 - RNA, 19 nt, Artificial Sequence
  synthetic
ccagcccaugguccagcca

SEQ ID NO: 3262 - RNA, 19 nt, Artificial Sequence
  synthetic
cagcccaugguccagccaa

SEQ ID NO: 3263 - RNA, 19 nt, Artificial Sequence
  synthetic
agcccaugguccagccaaa

SEQ ID NO: 3264 - RNA, 19 nt, Artificial Sequence
  synthetic
gcccaugguccagccaaaa

SEQ ID NO: 3265 - RNA, 19 nt, Artificial Sequence
  synthetic
cccaugguccagccaaaag

SEQ ID NO: 3266 - RNA, 19 nt, Artificial Sequence
  synthetic
caugguccagccaaaagua

SEQ ID NO: 3267 - RNA, 19 nt, Artificial Sequence
  synthetic
augguccagccaaaaguau

SEQ ID NO: 3268 - RNA, 19 nt, Artificial Sequence
  synthetic
ugguccagccaaaaguaug

SEQ ID NO: 3269 - RNA, 19 nt, Artificial Sequence
  synthetic
gguccagccaaaaguaugg

SEQ ID NO: 3270 - RNA, 19 nt, Artificial Sequence
  synthetic
guccagccaaaaguaugga

SEQ ID NO: 3271 - RNA, 19 nt, Artificial Sequence
  synthetic
uccagccaaaaguauggaa

SEQ ID NO: 3272 - RNA, 19 nt, Artificial Sequence
  synthetic
ccagccaaaaguauggaau

SEQ ID NO: 3273 - RNA, 19 nt, Artificial Sequence
  synthetic
cagccaaaaguauggaaua

SEQ ID NO: 3274 - RNA, 19 nt, Artificial Sequence
  synthetic
agccaaaaguauggaauau

SEQ ID NO: 3275 - RNA, 19 nt, Artificial Sequence
  synthetic
gccaaaaguauggaauaug

SEQ ID NO: 3276 - RNA, 19 nt, Artificial Sequence
  synthetic
ccaaaaguauggaauauga

SEQ ID NO: 3277 - RNA, 19 nt, Artificial Sequence
  synthetic
caaaaguauggaauaugau

SEQ ID NO: 3278 - RNA, 19 nt, Artificial Sequence
  synthetic
aaaaguauggaauaugaug

SEQ ID NO: 3279 - RNA, 19 nt, Artificial Sequence
  synthetic
aaaguauggaauaugaugc

SEQ ID NO: 3280 - RNA, 19 nt, Artificial Sequence
  synthetic
aaguauggaauaugaugcc

SEQ ID NO: 3281 - RNA, 19 nt, Artificial Sequence
  synthetic
aguauggaauaugaugccg

SEQ ID NO: 3282 - RNA, 19 nt, Artificial Sequence
  synthetic
guauggaauaugaugccgu

SEQ ID NO: 3283 - RNA, 19 nt, Artificial Sequence
  synthetic
uauggaauaugaugccguu

SEQ ID NO: 3284 - RNA, 19 nt, Artificial Sequence
  synthetic
auggaauaugaugccguug

SEQ ID NO: 3285 - RNA, 19 nt, Artificial Sequence
  synthetic
uggaauaugaugccguugc

SEQ ID NO: 3286 - RNA, 19 nt, Artificial Sequence
  synthetic
ggaauaugaugccguugca

SEQ ID NO: 3287 - RNA, 19 nt, Artificial Sequence
  synthetic
gaauaugaugccguugcaa

SEQ ID NO: 3288 - RNA, 19 nt, Artificial Sequence
  synthetic
aauaugaugccguugcaac

SEQ ID NO: 3289 - RNA, 19 nt, Artificial Sequence
  synthetic
auaugaugccguugcaacu

SEQ ID NO: 3290 - RNA, 19 nt, Artificial Sequence
  synthetic
uaugaugccguugcaacua

SEQ ID NO: 3291 - RNA, 19 nt, Artificial Sequence
  synthetic
augaugccguugcaacuac

SEQ ID NO: 3292 - RNA, 19 nt, Artificial Sequence
  synthetic
ugaugccguugcaacuaca

SEQ ID NO: 3293 - RNA, 19 nt, Artificial Sequence
  synthetic
gaugccguugcaacuacac

SEQ ID NO: 3294 - RNA, 19 nt, Artificial Sequence
  synthetic
augccguugcaacuacaca

SEQ ID NO: 3295 - RNA, 19 nt, Artificial Sequence
  synthetic
ugccguugcaacuacacac

SEQ ID NO: 3296 - RNA, 19 nt, Artificial Sequence
  synthetic
gccguugcaacuacacacu

SEQ ID NO: 3297 - RNA, 19 nt, Artificial Sequence
  synthetic
ccguugcaacuacacacuc

SEQ ID NO: 3298 - RNA, 19 nt, Artificial Sequence
  synthetic
cguugcaacuacacacucc

SEQ ID NO: 3299 - RNA, 19 nt, Artificial Sequence
  synthetic
guugcaacuacacacuccu

SEQ ID NO: 3300 - RNA, 19 nt, Artificial Sequence
  synthetic
uugcaacuacacacuccug

SEQ ID NO: 3301 - RNA, 19 nt, Artificial Sequence
  synthetic
ugcaacuacacacuccugg

SEQ ID NO: 3302 - RNA, 19 nt, Artificial Sequence
  synthetic
gcaacuacacacuccugga

SEQ ID NO: 3303 - RNA, 19 nt, Artificial Sequence
  synthetic
caacuacacacuccuggau

SEQ ID NO: 3304 - RNA, 19 nt, Artificial Sequence
  synthetic
aacuacacacuccuggauu

SEQ ID NO: 3305 - RNA, 19 nt, Artificial Sequence
  synthetic
acuacacacuccuggauuc

SEQ ID NO: 3306 - RNA, 19 nt, Artificial Sequence
  synthetic
cuacacacuccuggauucc

SEQ ID NO: 3307 - RNA, 19 nt, Artificial Sequence
  synthetic
uacacacuccuggauuccc

SEQ ID NO: 3308 - RNA, 19 nt, Artificial Sequence
  synthetic
acacacuccuggauuccca

SEQ ID NO: 3309 - RNA, 19 nt, Artificial Sequence
  synthetic
cacacuccuggauucccaa

SEQ ID NO: 3310 - RNA, 19 nt, Artificial Sequence
  synthetic
acacuccuggauucccaag

SEQ ID NO: 3311 - RNA, 19 nt, Artificial Sequence
  synthetic
cacuccuggauucccaaga

SEQ ID NO: 3312 - RNA, 19 nt, Artificial Sequence
  synthetic
acuccuggauucccaagag

SEQ ID NO: 3313 - RNA, 19 nt, Artificial Sequence
  synthetic
cuccuggauucccaagagg

SEQ ID NO: 3314 - RNA, 19 nt, Artificial Sequence
  synthetic
uccuggauucccaagagga

SEQ ID NO: 3315 - RNA, 19 nt, Artificial Sequence
  synthetic
ccuggauucccaagaggaa

SEQ ID NO: 3316 - RNA, 19 nt, Artificial Sequence
  synthetic
cuggauucccaagaggaac

SEQ ID NO: 3317 - RNA, 19 nt, Artificial Sequence
  synthetic
uggauucccaagaggaacc

SEQ ID NO: 3318 - RNA, 19 nt, Artificial Sequence
  synthetic
ggauucccaagaggaaccg

SEQ ID NO: 3319 - RNA, 19 nt, Artificial Sequence
  synthetic
gauucccaagaggaaccgc

SEQ ID NO: 3320 - RNA, 19 nt, Artificial Sequence
  synthetic
auucccaagaggaaccgcu

SEQ ID NO: 3321 - RNA, 19 nt, Artificial Sequence
  synthetic
uucccaagaggaaccgcuc

SEQ ID NO: 3322 - RNA, 19 nt, Artificial Sequence
  synthetic
ucccaagaggaaccgcucu

SEQ ID NO: 3323 - RNA, 19 nt, Artificial Sequence
  synthetic
cccaagaggaaccgcucua

SEQ ID NO: 3324 - RNA, 19 nt, Artificial Sequence
  synthetic
ccaagaggaaccgcucuau

SEQ ID NO: 3325 - RNA, 19 nt, Artificial Sequence
  synthetic
caagaggaaccgcucuauu

SEQ ID NO: 3326 - RNA, 19 nt, Artificial Sequence
  synthetic
aagaggaaccgcucuauuc

SEQ ID NO: 3327 - RNA, 19 nt, Artificial Sequence
  synthetic
agaggaaccgcucuauucu

SEQ ID NO: 3328 - RNA, 19 nt, Artificial Sequence
  synthetic
ucuauucucaacacaagcc

SEQ ID NO: 3329 - RNA, 19 nt, Artificial Sequence
  synthetic
aacacaagccaaaggggaa

SEQ ID NO: 3330 - RNA, 19 nt, Artificial Sequence
  synthetic
acacaagccaaaggggaau

SEQ ID NO: 3331 - RNA, 19 nt, Artificial Sequence
  synthetic
cacaagccaaaggggaauu

SEQ ID NO: 3332 - RNA, 19 nt, Artificial Sequence
  synthetic
acaagccaaaggggaauuc

SEQ ID NO: 3333 - RNA, 19 nt, Artificial Sequence
  synthetic
caagccaaaggggaauucu

SEQ ID NO: 3334 - RNA, 19 nt, Artificial Sequence
  synthetic
aagccaaaggggaauucuu

SEQ ID NO: 3335 - RNA, 19 nt, Artificial Sequence
  synthetic
agccaaaggggaauucuug

SEQ ID NO: 3336 - RNA, 19 nt, Artificial Sequence
  synthetic
gccaaaggggaauucuuga

SEQ ID NO: 3337 - RNA, 19 nt, Artificial Sequence
  synthetic
ccaaaggggaauucuugag

SEQ ID NO: 3338 - RNA, 19 nt, Artificial Sequence
  synthetic
caaaggggaauucuugagg

SEQ ID NO: 3339 - RNA, 19 nt, Artificial Sequence
  synthetic
aaaggggaauucuugagga

SEQ ID NO: 3340 - RNA, 19 nt, Artificial Sequence
  synthetic
aaggggaauucuugaggau

SEQ ID NO: 3341 - RNA, 19 nt, Artificial Sequence
  synthetic
aggggaauucuugaggaug

SEQ ID NO: 3342 - RNA, 19 nt, Artificial Sequence
  synthetic
ggggaauucuugaggauga

SEQ ID NO: 3343 - RNA, 19 nt, Artificial Sequence
  synthetic
gggaauucuugaggaugaa

SEQ ID NO: 3344 - RNA, 19 nt, Artificial Sequence
  synthetic
ggaauucuugaggaugaac

SEQ ID NO: 3345 - RNA, 19 nt, Artificial Sequence
  synthetic
gaauucuugaggaugaaca

SEQ ID NO: 3346 - RNA, 19 nt, Artificial Sequence
  synthetic
aauucuugaggaugaacag

SEQ ID NO: 3347 - RNA, 19 nt, Artificial Sequence
  synthetic
auucuugaggaugaacaga

SEQ ID NO: 3348 - RNA, 19 nt, Artificial Sequence
  synthetic
uucuugaggaugaacagau

SEQ ID NO: 3349 - RNA, 19 nt, Artificial Sequence
  synthetic
ucuugaggaugaacagaug

SEQ ID NO: 3350 - RNA, 19 nt, Artificial Sequence
  synthetic
cuugaggaugaacagaugu

SEQ ID NO: 3351 - RNA, 19 nt, Artificial Sequence
  synthetic
uugaggaugaacagaugua

SEQ ID NO: 3352 - RNA, 19 nt, Artificial Sequence
  synthetic
ugaggaugaacagauguac

SEQ ID NO: 3353 - RNA, 19 nt, Artificial Sequence
  synthetic
gaggaugaacagauguacc

SEQ ID NO: 3354 - RNA, 19 nt, Artificial Sequence
  synthetic
aggaugaacagauguacca

SEQ ID NO: 3355 - RNA, 19 nt, Artificial Sequence
  synthetic
gaugaacagauguaccaga

SEQ ID NO: 3356 - RNA, 19 nt, Artificial Sequence
  synthetic
aagugcugcaacuuguucg

SEQ ID NO: 3357 - RNA, 19 nt, Artificial Sequence
  synthetic
agugcugcaacuuguucga

SEQ ID NO: 3358 - RNA, 19 nt, Artificial Sequence
  synthetic
gugcugcaacuuguucgag

SEQ ID NO: 3359 - RNA, 19 nt, Artificial Sequence
  synthetic
ugcugcaacuuguucgaga

SEQ ID NO: 3360 - RNA, 19 nt, Artificial Sequence
  synthetic
gcugcaacuuguucgagaa

SEQ ID NO: 3361 - RNA, 19 nt, Artificial Sequence
  synthetic
cugcaacuuguucgagaaa

SEQ ID NO: 3362 - RNA, 19 nt, Artificial Sequence
  synthetic
ugcaacuuguucgagaaau

SEQ ID NO: 3363 - RNA, 19 nt, Artificial Sequence
  synthetic
gcaacuuguucgagaaauu

SEQ ID NO: 3364 - RNA, 19 nt, Artificial Sequence
  synthetic
caacuuguucgagaaauuu

SEQ ID NO: 3365 - RNA, 19 nt, Artificial Sequence
  synthetic
aacuuguucgagaaauuuu

SEQ ID NO: 3366 - RNA, 19 nt, Artificial Sequence
  synthetic
acuuguucgagaaauuuuu

SEQ ID NO: 3367 - RNA, 19 nt, Artificial Sequence
  synthetic
cuuguucgagaaauuuuuc

SEQ ID NO: 3368 - RNA, 19 nt, Artificial Sequence
  synthetic
uuguucgagaaauuuuucc

SEQ ID NO: 3369 - RNA, 19 nt, Artificial Sequence
  synthetic
uguucgagaaauuuuuccc

SEQ ID NO: 3370 - RNA, 19 nt, Artificial Sequence
  synthetic
guucgagaaauuuuucccu

SEQ ID NO: 3371 - RNA, 19 nt, Artificial Sequence
  synthetic
uucgagaaauuuuucccua

SEQ ID NO: 3372 - RNA, 19 nt, Artificial Sequence
  synthetic
ucgagaaauuuuucccuag

SEQ ID NO: 3373 - RNA, 19 nt, Artificial Sequence
  synthetic
cgagaaauuuuucccuagu

SEQ ID NO: 3374 - RNA, 19 nt, Artificial Sequence
  synthetic
gagaaauuuuucccuagua

SEQ ID NO: 3375 - RNA, 19 nt, Artificial Sequence
  synthetic
agaaauuuuucccuaguag

SEQ ID NO: 3376 - RNA, 19 nt, Artificial Sequence
  synthetic
gaaauuuuucccuaguagu

SEQ ID NO: 3377 - RNA, 19 nt, Artificial Sequence
  synthetic
aaauuuuucccuaguaguu

SEQ ID NO: 3378 - RNA, 19 nt, Artificial Sequence
  synthetic
aauuuuucccuaguaguuc

SEQ ID NO: 3379 - RNA, 19 nt, Artificial Sequence
  synthetic
auuuuucccuaguaguuca

SEQ ID NO: 3380 - RNA, 19 nt, Artificial Sequence
  synthetic
uuuuucccuaguaguucau

SEQ ID NO: 3381 - RNA, 19 nt, Artificial Sequence
  synthetic
uuuucccuaguaguucaua

SEQ ID NO: 3382 - RNA, 19 nt, Artificial Sequence
  synthetic
uuucccuaguaguucauau

SEQ ID NO: 3383 - RNA, 19 nt, Artificial Sequence
  synthetic
uucccuaguaguucauaua

SEQ ID NO: 3384 - RNA, 19 nt, Artificial Sequence
  synthetic
ucccuaguaguucauauag

SEQ ID NO: 3385 - RNA, 19 nt, Artificial Sequence
  synthetic
cccuaguaguucauauagg

SEQ ID NO: 3386 - RNA, 19 nt, Artificial Sequence
  synthetic
ccuaguaguucauauagga

SEQ ID NO: 3387 - RNA, 19 nt, Artificial Sequence
  synthetic
cuaguaguucauauaggag

SEQ ID NO: 3388 - RNA, 19 nt, Artificial Sequence
  synthetic
uaguaguucauauaggaga

SEQ ID NO: 3389 - RNA, 19 nt, Artificial Sequence
  synthetic
aguaguucauauaggagac

SEQ ID NO: 3390 - RNA, 19 nt, Artificial Sequence
  synthetic
guaguucauauaggagacc

SEQ ID NO: 3391 - RNA, 19 nt, Artificial Sequence
  synthetic
aguucauauaggagaccgg

SEQ ID NO: 3392 - RNA, 19 nt, Artificial Sequence
  synthetic
guuggaauuucuagcaugg

SEQ ID NO: 3393 - RNA, 19 nt, Artificial Sequence
  synthetic
uuggaauuucuagcauggu

SEQ ID NO: 3394 - RNA, 19 nt, Artificial Sequence
  synthetic
uggaauuucuagcauggug

SEQ ID NO: 3395 - RNA, 19 nt, Artificial Sequence
  synthetic
ggaauuucuagcauggugg

SEQ ID NO: 3396 - RNA, 19 nt, Artificial Sequence
  synthetic
gaauuucuagcauggugga

SEQ ID NO: 3397 - RNA, 19 nt, Artificial Sequence
  synthetic
aauuucuagcaugguggag

SEQ ID NO: 3398 - RNA, 19 nt, Artificial Sequence
  synthetic
auuucuagcaugguggagg

SEQ ID NO: 3399 - RNA, 19 nt, Artificial Sequence
  synthetic
uuucuagcaugguggaggc

SEQ ID NO: 3400 - RNA, 19 nt, Artificial Sequence
  synthetic
uucuagcaugguggaggcc

SEQ ID NO: 3401 - RNA, 19 nt, Artificial Sequence
  synthetic
ucuagcaugguggaggcca

SEQ ID NO: 3402 - RNA, 19 nt, Artificial Sequence
  synthetic
cuagcaugguggaggccau

SEQ ID NO: 3403 - RNA, 19 nt, Artificial Sequence
  synthetic
uagcaugguggaggccaug

SEQ ID NO: 3404 - RNA, 19 nt, Artificial Sequence
  synthetic
agcaugguggaggccaugg

SEQ ID NO: 3405 - RNA, 19 nt, Artificial Sequence
  synthetic
gcaugguggaggccauggu

SEQ ID NO: 3406 - RNA, 19 nt, Artificial Sequence
  synthetic
caugguggaggccauggug

SEQ ID NO: 3407 - RNA, 19 nt, Artificial Sequence
  synthetic
augguggaggccauggugu

SEQ ID NO: 3408 - RNA, 19 nt, Artificial Sequence
  synthetic
ugguggaggccaugguguc

SEQ ID NO: 3409 - RNA, 19 nt, Artificial Sequence
  synthetic
gguggaggccauggugucu

SEQ ID NO: 3410 - RNA, 19 nt, Artificial Sequence
  synthetic
guggaggccauggugucua

SEQ ID NO: 3411 - RNA, 19 nt, Artificial Sequence
  synthetic
uggaggccauggugucuag

SEQ ID NO: 3412 - RNA, 19 nt, Artificial Sequence
  synthetic
ggaggccauggugucuagg

SEQ ID NO: 3413 - RNA, 19 nt, Artificial Sequence
  synthetic
gaggccauggugucuaggg

SEQ ID NO: 3414 - RNA, 19 nt, Artificial Sequence
  synthetic
aggccauggugucuagggc

SEQ ID NO: 3415 - RNA, 19 nt, Artificial Sequence
  synthetic
ggccauggugucuagggcc

SEQ ID NO: 3416 - RNA, 19 nt, Artificial Sequence
  synthetic
gccauggugucuagggccc

SEQ ID NO: 3417 - RNA, 19 nt, Artificial Sequence
  synthetic
ccauggugucuagggcccg

SEQ ID NO: 3418 - RNA, 19 nt, Artificial Sequence
  synthetic
cauggugucuagggcccgg

SEQ ID NO: 3419 - RNA, 19 nt, Artificial Sequence
  synthetic
auggugucuagggcccgga

SEQ ID NO: 3420 - RNA, 19 nt, Artificial Sequence
  synthetic
uggugucuagggcccggau

SEQ ID NO: 3421 - RNA, 19 nt, Artificial Sequence
  synthetic
ggugucuagggcccggauu

SEQ ID NO: 3422 - RNA, 19 nt, Artificial Sequence
  synthetic
gugucuagggcccggauug

SEQ ID NO: 3423 - RNA, 19 nt, Artificial Sequence
  synthetic
ugucuagggcccggauuga

SEQ ID NO: 3424 - RNA, 19 nt, Artificial Sequence
  synthetic
gucuagggcccggauugau

SEQ ID NO: 3425 - RNA, 19 nt, Artificial Sequence
  synthetic
ucuagggcccggauugaug

SEQ ID NO: 3426 - RNA, 19 nt, Artificial Sequence
  synthetic
cuagggcccggauugaugc

SEQ ID NO: 3427 - RNA, 19 nt, Artificial Sequence
  synthetic
uagggcccggauugaugcc

SEQ ID NO: 3428 - RNA, 19 nt, Artificial Sequence
  synthetic
agggcccggauugaugcca

SEQ ID NO: 3429 - RNA, 19 nt, Artificial Sequence
  synthetic
gggcccggauugaugccag

SEQ ID NO: 3430 - RNA, 19 nt, Artificial Sequence
  synthetic
ggcccggauugaugccaga

SEQ ID NO: 3431 - RNA, 19 nt, Artificial Sequence
  synthetic
gcccggauugaugccagaa

SEQ ID NO: 3432 - RNA, 19 nt, Artificial Sequence
  synthetic
cccggauugaugccagaau

SEQ ID NO: 3433 - RNA, 19 nt, Artificial Sequence
  synthetic
ccggauugaugccagaauu

SEQ ID NO: 3434 - RNA, 19 nt, Artificial Sequence
  synthetic
cggauugaugccagaauug

SEQ ID NO: 3435 - RNA, 19 nt, Artificial Sequence
  synthetic
ggauugaugccagaauuga

SEQ ID NO: 3436 - RNA, 19 nt, Artificial Sequence
  synthetic
gauugaugccagaauugac

SEQ ID NO: 3437 - RNA, 19 nt, Artificial Sequence
  synthetic
auugaugccagaauugacu

SEQ ID NO: 3438 - RNA, 19 nt, Artificial Sequence
  synthetic
uugaugccagaauugacuu

SEQ ID NO: 3439 - RNA, 19 nt, Artificial Sequence
  synthetic
ugaugccagaauugacuuc

SEQ ID NO: 3440 - RNA, 19 nt, Artificial Sequence
  synthetic
gaugccagaauugacuucg

SEQ ID NO: 3441 - RNA, 19 nt, Artificial Sequence
  synthetic
augccagaauugacuucga

SEQ ID NO: 3442 - RNA, 19 nt, Artificial Sequence
  synthetic
ugccagaauugacuucgag

SEQ ID NO: 3443 - RNA, 19 nt, Artificial Sequence
  synthetic
gccagaauugacuucgagu

SEQ ID NO: 3444 - RNA, 19 nt, Artificial Sequence
  synthetic
ccagaauugacuucgaguc

SEQ ID NO: 3445 - RNA, 19 nt, Artificial Sequence
  synthetic
cagaauugacuucgagucu

SEQ ID NO: 3446 - RNA, 19 nt, Artificial Sequence
  synthetic
agaauugacuucgagucug

SEQ ID NO: 3447 - RNA, 19 nt, Artificial Sequence
  synthetic
gaauugacuucgagucugg

SEQ ID NO: 3448 - RNA, 19 nt, Artificial Sequence
  synthetic
aauugacuucgagucugga

SEQ ID NO: 3449 - RNA, 19 nt, Artificial Sequence
  synthetic
auugacuucgagucuggac

SEQ ID NO: 3450 - RNA, 19 nt, Artificial Sequence
  synthetic
uugacuucgagucuggacg

SEQ ID NO: 3451 - RNA, 19 nt, Artificial Sequence
  synthetic
ugacuucgagucuggacgg

SEQ ID NO: 3452 - RNA, 19 nt, Artificial Sequence
  synthetic
gacuucgagucuggacgga

SEQ ID NO: 3453 - RNA, 19 nt, Artificial Sequence
  synthetic
acuucgagucuggacggau

SEQ ID NO: 3454 - RNA, 19 nt, Artificial Sequence
  synthetic
cuucgagucuggacggauu

SEQ ID NO: 3455 - RNA, 19 nt, Artificial Sequence
  synthetic
uucgagucuggacggauua

SEQ ID NO: 3456 - RNA, 19 nt, Artificial Sequence
  synthetic
ucgagucuggacggauuaa

SEQ ID NO: 3457 - RNA, 19 nt, Artificial Sequence
  synthetic
cgagucuggacggauuaag

SEQ ID NO: 3458 - RNA, 19 nt, Artificial Sequence
  synthetic
gagucuggacggauuaaga

SEQ ID NO: 3459 - RNA, 19 nt, Artificial Sequence
  synthetic
agucuggacggauuaagaa

SEQ ID NO: 3460 - RNA, 19 nt, Artificial Sequence
  synthetic
gucuggacggauuaagaag

SEQ ID NO: 3461 - RNA, 19 nt, Artificial Sequence
  synthetic
ucuggacggauuaagaagg

SEQ ID NO: 3462 - RNA, 19 nt, Artificial Sequence
  synthetic
cuggacggauuaagaagga

SEQ ID NO: 3463 - RNA, 19 nt, Artificial Sequence
  synthetic
uggacggauuaagaaggaa

SEQ ID NO: 3464 - RNA, 19 nt, Artificial Sequence
  synthetic
ggacggauuaagaaggaag

SEQ ID NO: 3465 - RNA, 19 nt, Artificial Sequence
  synthetic
gacggauuaagaaggaaga

SEQ ID NO: 3466 - RNA, 19 nt, Artificial Sequence
  synthetic
gaguucucugagaucauga

SEQ ID NO: 3467 - RNA, 19 nt, Artificial Sequence
  synthetic
uucucugagaucaugaaga

SEQ ID NO: 3468 - RNA, 19 nt, Artificial Sequence
  synthetic
ucucugagaucaugaagau

SEQ ID NO: 3469 - RNA, 19 nt, Artificial Sequence
  synthetic
cucugagaucaugaagauc

SEQ ID NO: 3470 - RNA, 19 nt, Artificial Sequence
  synthetic
ucugagaucaugaagaucu

SEQ ID NO: 3471 - RNA, 19 nt, Artificial Sequence
  synthetic
cugagaucaugaagaucug

SEQ ID NO: 3472 - RNA, 19 nt, Artificial Sequence
  synthetic
ugagaucaugaagaucugu

SEQ ID NO: 3473 - RNA, 19 nt, Artificial Sequence
  synthetic
gagaucaugaagaucuguu

SEQ ID NO: 3474 - RNA, 19 nt, Artificial Sequence
  synthetic
agaucaugaagaucuguuc

SEQ ID NO: 3475 - RNA, 19 nt, Artificial Sequence
  synthetic
gaucaugaagaucuguucc

SEQ ID NO: 3476 - RNA, 19 nt, Artificial Sequence
  synthetic
aucaugaagaucuguucca

SEQ ID NO: 3477 - RNA, 19 nt, Artificial Sequence
  synthetic
ucaugaagaucuguuccac

SEQ ID NO: 3478 - RNA, 19 nt, Artificial Sequence
  synthetic
caugaagaucuguuccacc

SEQ ID NO: 3479 - RNA, 19 nt, Artificial Sequence
  synthetic
augaagaucuguuccacca

SEQ ID NO: 3480 - RNA, 19 nt, Artificial Sequence
  synthetic
ugaagaucuguuccaccau

SEQ ID NO: 3481 - RNA, 19 nt, Artificial Sequence
  synthetic
gaagaucuguuccaccauu

SEQ ID NO: 3482 - RNA, 19 nt, Artificial Sequence
  synthetic
aagaucuguuccaccauug

SEQ ID NO: 3483 - RNA, 19 nt, Artificial Sequence
  synthetic
agaucuguuccaccauuga

SEQ ID NO: 3484 - RNA, 19 nt, Artificial Sequence
  synthetic
gaucuguuccaccauugaa

SEQ ID NO: 3485 - RNA, 19 nt, Artificial Sequence
  synthetic
aucuguuccaccauugaag

SEQ ID NO: 3486 - RNA, 19 nt, Artificial Sequence
  synthetic
ucuguuccaccauugaaga

SEQ ID NO: 3487 - RNA, 19 nt, Artificial Sequence
  synthetic
cuguuccaccauugaagaa

SEQ ID NO: 3488 - RNA, 19 nt, Artificial Sequence
  synthetic
uguuccaccauugaagaac

SEQ ID NO: 3489 - RNA, 19 nt, Artificial Sequence
  synthetic
guuccaccauugaagaacu

SEQ ID NO: 3490 - RNA, 19 nt, Artificial Sequence
  synthetic
uuccaccauugaagaacuc

SEQ ID NO: 3491 - RNA, 19 nt, Artificial Sequence
  synthetic
uccaccauugaagaacuca

SEQ ID NO: 3492 - RNA, 19 nt, Artificial Sequence
  synthetic
ccaccauugaagaacucag

SEQ ID NO: 3493 - RNA, 19 nt, Artificial Sequence
  synthetic
caccauugaagaacucaga

SEQ ID NO: 3494 - RNA, 19 nt, Artificial Sequence
  synthetic
accauugaagaacucagac

SEQ ID NO: 3495 - RNA, 19 nt, Artificial Sequence
  synthetic
ccauugaagaacucagacg

SEQ ID NO: 3496 - RNA, 19 nt, Artificial Sequence
  synthetic
cauugaagaacucagacgg

SEQ ID NO: 3497 - RNA, 19 nt, Artificial Sequence
  synthetic
auugaagaacucagacggc

SEQ ID NO: 3498 - RNA, 19 nt, Artificial Sequence
  synthetic
uugaagaacucagacggca

SEQ ID NO: 3499 - RNA, 19 nt, Artificial Sequence
  synthetic
ugaagaacucagacggcaa

SEQ ID NO: 3500 - RNA, 19 nt, Artificial Sequence
  synthetic
gaagaacucagacggcaaa

SEQ ID NO: 3501 - RNA, 19 nt, Artificial Sequence
  synthetic
aagaacucagacggcaaaa

SEQ ID NO: 3502 - RNA, 19 nt, Artificial Sequence
  synthetic
agaacucagacggcaaaaa

SEQ ID NO: 3503 - RNA, 19 nt, Artificial Sequence
  synthetic
gaacucagacggcaaaaau

SEQ ID NO: 3504 - RNA, 19 nt, Artificial Sequence
  synthetic
aacucagacggcaaaaaua

SEQ ID NO: 3505 - RNA, 19 nt, Artificial Sequence
  synthetic
acucagacggcaaaaauaa

SEQ ID NO: 3506 - RNA, 19 nt, Artificial Sequence
  synthetic
cucagacggcaaaaauaau

SEQ ID NO: 3507 - RNA, 19 nt, Artificial Sequence
  synthetic
aaauaaugaauuuagcuug

SEQ ID NO: 3508 - RNA, 19 nt, Artificial Sequence
  synthetic
guccuucaugaaaaaaugc

SEQ ID NO: 3509 - RNA, 19 nt, Artificial Sequence
  synthetic
ccucucuuauucacucuuu

SEQ ID NO: 3510 - RNA, 19 nt, Artificial Sequence
  synthetic
gaggccuuauuuucucaau

SEQ ID NO: 3511 - RNA, 19 nt, Artificial Sequence
  synthetic
gacuccuaaaaccguacuu

SEQ ID NO: 3512 - RNA, 19 nt, Artificial Sequence
  synthetic
ggcaucauauuccauacuu

SEQ ID NO: 3513 - RNA, 19 nt, Artificial Sequence
  synthetic
ggcucauuauccucaggua

SEQ ID NO: 3514 - RNA, 19 nt, Artificial Sequence
  synthetic
ccagacuguucaagcuuuu

SEQ ID NO: 3515 - RNA, 19 nt, Artificial Sequence
  synthetic
cgaacaaguugcagcacuu

SEQ ID NO: 3516 - RNA, 19 nt, Artificial Sequence
  synthetic
gcaucauauuccauacuuu

SEQ ID NO: 3517 - RNA, 19 nt, Artificial Sequence
  synthetic
uucaaaugguuugccugcu

SEQ ID NO: 3518 - RNA, 19 nt, Artificial Sequence
  synthetic
gauugacauccauucaaau

SEQ ID NO: 3519 - RNA, 19 nt, Artificial Sequence
  synthetic
ggauugacauccauucaaa

SEQ ID NO: 3520 - RNA, 19 nt, Artificial Sequence
  synthetic
cggauugacauccauucaa

SEQ ID NO: 3521 - RNA, 19 nt, Artificial Sequence
  synthetic
ucggauugacauccauuca

SEQ ID NO: 3522 - RNA, 19 nt, Artificial Sequence
  synthetic
gucggauugacauccauuc

SEQ ID NO: 3523 - RNA, 19 nt, Artificial Sequence
  synthetic
gagucggauugacauccau

SEQ ID NO: 3524 - RNA, 19 nt, Artificial Sequence
  synthetic
agagucggauugacaucca

SEQ ID NO: 3525 - RNA, 19 nt, Artificial Sequence
  synthetic
uagagucggauugacaucc

SEQ ID NO: 3526 - RNA, 19 nt, Artificial Sequence
  synthetic
guagagucggauugacauc

SEQ ID NO: 3527 - RNA, 19 nt, Artificial Sequence
  synthetic
aguagagucggauugacau

SEQ ID NO: 3528 - RNA, 19 nt, Artificial Sequence
  synthetic
gaaccuuuaggaaaaguag

SEQ ID NO: 3529 - RNA, 19 nt, Artificial Sequence
  synthetic
gcgcuggaaccuuuaggaa

SEQ ID NO: 3530 - RNA, 19 nt, Artificial Sequence
  synthetic
ugcgcuggaaccuuuagga

SEQ ID NO: 3531 - RNA, 19 nt, Artificial Sequence
  synthetic
uugcgcuggaaccuuuagg

SEQ ID NO: 3532 - RNA, 19 nt, Artificial Sequence
  synthetic
uuugcgcuggaaccuuuag

SEQ ID NO: 3533 - RNA, 19 nt, Artificial Sequence
  synthetic
uuuugcgcuggaaccuuua

SEQ ID NO: 3534 - RNA, 19 nt, Artificial Sequence
  synthetic
auuuugcgcuggaaccuuu

SEQ ID NO: 3535 - RNA, 19 nt, Artificial Sequence
  synthetic
cauuuugcgcuggaaccuu

SEQ ID NO: 3536 - RNA, 19 nt, Artificial Sequence
  synthetic
gcauuuugcgcuggaaccu

SEQ ID NO: 3537 - RNA, 19 nt, Artificial Sequence
  synthetic
ggcauuuugcgcuggaacc

SEQ ID NO: 3538 - RNA, 19 nt, Artificial Sequence
  synthetic
uggcauuuugcgcuggaac

SEQ ID NO: 3539 - RNA, 19 nt, Artificial Sequence
  synthetic
auggcauuuugcgcuggaa

SEQ ID NO: 3540 - RNA, 19 nt, Artificial Sequence
  synthetic
uauggcauuuugcgcugga

SEQ ID NO: 3541 - RNA, 19 nt, Artificial Sequence
  synthetic
uuauggcauuuugcgcugg

SEQ ID NO: 3542 - RNA, 19 nt, Artificial Sequence
  synthetic
cuuauggcauuuugcgcug

SEQ ID NO: 3543 - RNA, 19 nt, Artificial Sequence
  synthetic
gcuuauggcauuuugcgcu

SEQ ID NO: 3544 - RNA, 19 nt, Artificial Sequence
  synthetic
ugcuuauggcauuuugcgc

SEQ ID NO: 3545 - RNA, 19 nt, Artificial Sequence
  synthetic
gugcuuauggcauuuugcg

SEQ ID NO: 3546 - RNA, 19 nt, Artificial Sequence
  synthetic
ggugcuuauggcauuuugc

SEQ ID NO: 3547 - RNA, 19 nt, Artificial Sequence
  synthetic
uggugcuuauggcauuuug

SEQ ID NO: 3548 - RNA, 19 nt, Artificial Sequence
  synthetic
guggugcuuauggcauuuu

SEQ ID NO: 3549 - RNA, 19 nt, Artificial Sequence
  synthetic
uguggugcuuauggcauuu

SEQ ID NO: 3550 - RNA, 19 nt, Artificial Sequence
  synthetic
auguggugcuuauggcauu

SEQ ID NO: 3551 - RNA, 19 nt, Artificial Sequence
  synthetic
aauguggugcuuauggcau

SEQ ID NO: 3552 - RNA, 19 nt, Artificial Sequence
  synthetic
gaauguggugcuuauggca

SEQ ID NO: 3553 - RNA, 19 nt, Artificial Sequence
  synthetic
ggaauguggugcuuauggc

SEQ ID NO: 3554 - RNA, 19 nt, Artificial Sequence
  synthetic
gggaauguggugcuuaugg

SEQ ID NO: 3555 - RNA, 19 nt, Artificial Sequence
  synthetic
agggaauguggugcuuaug

SEQ ID NO: 3556 - RNA, 19 nt, Artificial Sequence
  synthetic
aagggaauguggugcuuau

SEQ ID NO: 3557 - RNA, 19 nt, Artificial Sequence
  synthetic
uaagggaauguggugcuua

SEQ ID NO: 3558 - RNA, 19 nt, Artificial Sequence
  synthetic
auaagggaauguggugcuu

SEQ ID NO: 3559 - RNA, 19 nt, Artificial Sequence
  synthetic
uauaagggaauguggugcu

SEQ ID NO: 3560 - RNA, 19 nt, Artificial Sequence
  synthetic
guauaagggaauguggugc

SEQ ID NO: 3561 - RNA, 19 nt, Artificial Sequence
  synthetic
aguauaagggaauguggug

SEQ ID NO: 3562 - RNA, 19 nt, Artificial Sequence
  synthetic
caguauaagggaauguggu

SEQ ID NO: 3563 - RNA, 19 nt, Artificial Sequence
  synthetic
ccaguauaagggaaugugg

SEQ ID NO: 3564 - RNA, 19 nt, Artificial Sequence
  synthetic
uccaguauaagggaaugug

SEQ ID NO: 3565 - RNA, 19 nt, Artificial Sequence
  synthetic
cuccaguauaagggaaugu

SEQ ID NO: 3566 - RNA, 19 nt, Artificial Sequence
  synthetic
ucuccaguauaagggaaug

SEQ ID NO: 3567 - RNA, 19 nt, Artificial Sequence
  synthetic
aucuccaguauaagggaau

SEQ ID NO: 3568 - RNA, 19 nt, Artificial Sequence
  synthetic
gaucuccaguauaagggaa

SEQ ID NO: 3569 - RNA, 19 nt, Artificial Sequence
  synthetic
ggaucuccaguauaaggga

SEQ ID NO: 3570 - RNA, 19 nt, Artificial Sequence
  synthetic
aggaucuccaguauaaggg

SEQ ID NO: 3571 - RNA, 19 nt, Artificial Sequence
  synthetic
gaggaucuccaguauaagg

SEQ ID NO: 3572 - RNA, 19 nt, Artificial Sequence
  synthetic
ggaggaucuccaguauaag

SEQ ID NO: 3573 - RNA, 19 nt, Artificial Sequence
  synthetic
uggaggaucuccaguauaa

SEQ ID NO: 3574 - RNA, 19 nt, Artificial Sequence
  synthetic
auggaggaucuccaguaua

SEQ ID NO: 3575 - RNA, 19 nt, Artificial Sequence
  synthetic
uauggaggaucuccaguau

SEQ ID NO: 3576 - RNA, 19 nt, Artificial Sequence
  synthetic
guauggaggaucuccagua

SEQ ID NO: 3577 - RNA, 19 nt, Artificial Sequence
  synthetic
uguauggaggaucuccagu

SEQ ID NO: 3578 - RNA, 19 nt, Artificial Sequence
  synthetic
cuguauggaggaucuccag

SEQ ID NO: 3579 - RNA, 19 nt, Artificial Sequence
  synthetic
gcuguauggaggaucucca

SEQ ID NO: 3580 - RNA, 19 nt, Artificial Sequence
  synthetic
ggcuguauggaggaucucc

SEQ ID NO: 3581 - RNA, 19 nt, Artificial Sequence
  synthetic
uggcuguauggaggaucuc

SEQ ID NO: 3582 - RNA, 19 nt, Artificial Sequence
  synthetic
auggcuguauggaggaucu

SEQ ID NO: 3583 - RNA, 19 nt, Artificial Sequence
  synthetic
cauggcuguauggaggauc

SEQ ID NO: 3584 - RNA, 19 nt, Artificial Sequence
  synthetic
ccauggcuguauggaggau

SEQ ID NO: 3585 - RNA, 19 nt, Artificial Sequence
  synthetic
uccauggcuguauggagga

SEQ ID NO: 3586 - RNA, 19 nt, Artificial Sequence
  synthetic
uuccauggcuguauggagg

SEQ ID NO: 3587 - RNA, 19 nt, Artificial Sequence
  synthetic
guuccauggcuguauggag

SEQ ID NO: 3588 - RNA, 19 nt, Artificial Sequence
  synthetic
uguuccauggcuguaugga

SEQ ID NO: 3589 - RNA, 19 nt, Artificial Sequence
  synthetic
cuguuccauggcuguaugg

SEQ ID NO: 3590 - RNA, 19 nt, Artificial Sequence
  synthetic
ccuguuccauggcuguaug

SEQ ID NO: 3591 - RNA, 19 nt, Artificial Sequence
  synthetic
uccuguuccauggcuguau

SEQ ID NO: 3592 - RNA, 19 nt, Artificial Sequence
  synthetic
uuccuguuccauggcugua

SEQ ID NO: 3593 - RNA, 19 nt, Artificial Sequence
  synthetic
guuccuguuccauggcugu

SEQ ID NO: 3594 - RNA, 19 nt, Artificial Sequence
  synthetic
uguuccuguuccauggcug

SEQ ID NO: 3595 - RNA, 19 nt, Artificial Sequence
  synthetic
cuguuccuguuccauggcu

SEQ ID NO: 3596 - RNA, 19 nt, Artificial Sequence
  synthetic
ccuguuccuguuccauggc

SEQ ID NO: 3597 - RNA, 19 nt, Artificial Sequence
  synthetic
ugguguacccuguuccugu

SEQ ID NO: 3598 - RNA, 19 nt, Artificial Sequence
  synthetic
augguguacccuguuccug

SEQ ID NO: 3599 - RNA, 19 nt, Artificial Sequence
  synthetic
caugguguacccuguuccu

SEQ ID NO: 3600 - RNA, 19 nt, Artificial Sequence
  synthetic
ccaugguguacccuguucc

SEQ ID NO: 3601 - RNA, 19 nt, Artificial Sequence
  synthetic
uccaugguguacccuguuc

SEQ ID NO: 3602 - RNA, 19 nt, Artificial Sequence
  synthetic
guccaugguguacccuguu

SEQ ID NO: 3603 - RNA, 19 nt, Artificial Sequence
  synthetic
uguccaugguguacccugu

SEQ ID NO: 3604 - RNA, 19 nt, Artificial Sequence
  synthetic
guguccaugguguacccug

SEQ ID NO: 3605 - RNA, 19 nt, Artificial Sequence
  synthetic
uguguccaugguguacccu

SEQ ID NO: 3606 - RNA, 19 nt, Artificial Sequence
  synthetic
cuguguccaugguguaccc

SEQ ID NO: 3607 - RNA, 19 nt, Artificial Sequence
  synthetic
acuguguccaugguguacc

SEQ ID NO: 3608 - RNA, 19 nt, Artificial Sequence
  synthetic
ugacuguguccauggugua

SEQ ID NO: 3609 - RNA, 19 nt, Artificial Sequence
  synthetic
uugacuguguccauggugu

SEQ ID NO: 3610 - RNA, 19 nt, Artificial Sequence
  synthetic
guugacuguguccauggug

SEQ ID NO: 3611 - RNA, 19 nt, Artificial Sequence
  synthetic
uguugacuguguccauggu

SEQ ID NO: 3612 - RNA, 19 nt, Artificial Sequence
  synthetic
cuguugacuguguccaugg

SEQ ID NO: 3613 - RNA, 19 nt, Artificial Sequence
  synthetic
ucuguugacuguguccaug

SEQ ID NO: 3614 - RNA, 19 nt, Artificial Sequence
  synthetic
uucuguugacuguguccau

SEQ ID NO: 3615 - RNA, 19 nt, Artificial Sequence
  synthetic
guucuguugacugugucca

SEQ ID NO: 3616 - RNA, 19 nt, Artificial Sequence
  synthetic
uguucuguugacugugucc

SEQ ID NO: 3617 - RNA, 19 nt, Artificial Sequence
  synthetic
guguucuguugacuguguc

SEQ ID NO: 3618 - RNA, 19 nt, Artificial Sequence
  synthetic
uguguucuguugacugugu

SEQ ID NO: 3619 - RNA, 19 nt, Artificial Sequence
  synthetic
guguguucuguugacugug

SEQ ID NO: 3620 - RNA, 19 nt, Artificial Sequence
  synthetic
gguguguucuguugacugu

SEQ ID NO: 3621 - RNA, 19 nt, Artificial Sequence
  synthetic
ugguguguucuguugacug

SEQ ID NO: 3622 - RNA, 19 nt, Artificial Sequence
  synthetic
uugguguguucuguugacu

SEQ ID NO: 3623 - RNA, 19 nt, Artificial Sequence
  synthetic
auugguguguucuguugac

SEQ ID NO: 3624 - RNA, 19 nt, Artificial Sequence
  synthetic
uauugguguguucuguuga

SEQ ID NO: 3625 - RNA, 19 nt, Artificial Sequence
  synthetic
auauugguguguucuguug

SEQ ID NO: 3626 - RNA, 19 nt, Artificial Sequence
  synthetic
aauauugguguguucuguu

SEQ ID NO: 3627 - RNA, 19 nt, Artificial Sequence
  synthetic
gaauauugguguguucugu

SEQ ID NO: 3628 - RNA, 19 nt, Artificial Sequence
  synthetic
ugaauauugguguguucug

SEQ ID NO: 3629 - RNA, 19 nt, Artificial Sequence
  synthetic
cugaauauugguguguucu

SEQ ID NO: 3630 - RNA, 19 nt, Artificial Sequence
  synthetic
ucugaauauugguguguuc

SEQ ID NO: 3631 - RNA, 19 nt, Artificial Sequence
  synthetic
acuuccccuuuucugaaua

SEQ ID NO: 3632 - RNA, 19 nt, Artificial Sequence
  synthetic
uuucuguauuugucgucca

SEQ ID NO: 3633 - RNA, 19 nt, Artificial Sequence
  synthetic
ccccaguuucuguauuugu

SEQ ID NO: 3634 - RNA, 19 nt, Artificial Sequence
  synthetic
gccccaguuucuguauuug

SEQ ID NO: 3635 - RNA, 19 nt, Artificial Sequence
  synthetic
ugccccaguuucuguauuu

SEQ ID NO: 3636 - RNA, 19 nt, Artificial Sequence
  synthetic
gugccccaguuucuguauu

SEQ ID NO: 3637 - RNA, 19 nt, Artificial Sequence
  synthetic
ggugccccaguuucuguau

SEQ ID NO: 3638 - RNA, 19 nt, Artificial Sequence
  synthetic
gggugccccaguuucugua

SEQ ID NO: 3639 - RNA, 19 nt, Artificial Sequence
  synthetic
ggggugccccaguuucugu

SEQ ID NO: 3640 - RNA, 19 nt, Artificial Sequence
  synthetic
uggggugccccaguuucug

SEQ ID NO: 3641 - RNA, 19 nt, Artificial Sequence
  synthetic
uuggggugccccaguuucu

SEQ ID NO: 3642 - RNA, 19 nt, Artificial Sequence
  synthetic
guuggggugccccaguuuc

SEQ ID NO: 3643 - RNA, 19 nt, Artificial Sequence
  synthetic
aguuggggugccccaguuu

SEQ ID NO: 3644 - RNA, 19 nt, Artificial Sequence
  synthetic
gaguuggggugccccaguu

SEQ ID NO: 3645 - RNA, 19 nt, Artificial Sequence
  synthetic
ugaguuggggugccccagu

SEQ ID NO: 3646 - RNA, 19 nt, Artificial Sequence
  synthetic
uugaguuggggugccccag

SEQ ID NO: 3647 - RNA, 19 nt, Artificial Sequence
  synthetic
guugaguuggggugcccca

SEQ ID NO: 3648 - RNA, 19 nt, Artificial Sequence
  synthetic
gguugaguuggggugcccc

SEQ ID NO: 3649 - RNA, 19 nt, Artificial Sequence
  synthetic
ggguugaguuggggugccc

SEQ ID NO: 3650 - RNA, 19 nt, Artificial Sequence
  synthetic
uggguugaguuggggugcc

SEQ ID NO: 3651 - RNA, 19 nt, Artificial Sequence
  synthetic
uuggguugaguuggggugc

SEQ ID NO: 3652 - RNA, 19 nt, Artificial Sequence
  synthetic
auuggguugaguuggggug

SEQ ID NO: 3653 - RNA, 19 nt, Artificial Sequence
  synthetic
aauuggguugaguuggggu

SEQ ID NO: 3654 - RNA, 19 nt, Artificial Sequence
  synthetic
caauuggguugaguugggg

SEQ ID NO: 3655 - RNA, 19 nt, Artificial Sequence
  synthetic
ucaauuggguugaguuggg

SEQ ID NO: 3656 - RNA, 19 nt, Artificial Sequence
  synthetic
aucaauuggguugaguugg

SEQ ID NO: 3657 - RNA, 19 nt, Artificial Sequence
  synthetic
caucaauuggguugaguug

SEQ ID NO: 3658 - RNA, 19 nt, Artificial Sequence
  synthetic
ccaucaauuggguugaguu

SEQ ID NO: 3659 - RNA, 19 nt, Artificial Sequence
  synthetic
uccaucaauuggguugagu

SEQ ID NO: 3660 - RNA, 19 nt, Artificial Sequence
  synthetic
guccaucaauuggguugag

SEQ ID NO: 3661 - RNA, 19 nt, Artificial Sequence
  synthetic
gguccaucaauuggguuga

SEQ ID NO: 3662 - RNA, 19 nt, Artificial Sequence
  synthetic
ugguccaucaauuggguug

SEQ ID NO: 3663 - RNA, 19 nt, Artificial Sequence
  synthetic
gugguccaucaauuggguu

SEQ ID NO: 3664 - RNA, 19 nt, Artificial Sequence
  synthetic
agugguccaucaauugggu

SEQ ID NO: 3665 - RNA, 19 nt, Artificial Sequence
  synthetic
uagugguccaucaauuggg

SEQ ID NO: 3666 - RNA, 19 nt, Artificial Sequence
  synthetic
guagugguccaucaauugg

SEQ ID NO: 3667 - RNA, 19 nt, Artificial Sequence
  synthetic
gguagugguccaucaauug

SEQ ID NO: 3668 - RNA, 19 nt, Artificial Sequence
  synthetic
agguagugguccaucaauu

SEQ ID NO: 3669 - RNA, 19 nt, Artificial Sequence
  synthetic
cagguagugguccaucaau

SEQ ID NO: 3670 - RNA, 19 nt, Artificial Sequence
  synthetic
ucagguagugguccaucaa

SEQ ID NO: 3671 - RNA, 19 nt, Artificial Sequence
  synthetic
cucagguagugguccauca

SEQ ID NO: 3672 - RNA, 19 nt, Artificial Sequence
  synthetic
ccucagguagugguccauc

SEQ ID NO: 3673 - RNA, 19 nt, Artificial Sequence
  synthetic
uccucagguagugguccau

SEQ ID NO: 3674 - RNA, 19 nt, Artificial Sequence
  synthetic
auccucagguaguggucca

SEQ ID NO: 3675 - RNA, 19 nt, Artificial Sequence
  synthetic
uauccucagguaguggucc

SEQ ID NO: 3676 - RNA, 19 nt, Artificial Sequence
  synthetic
uuauccucagguagugguc

SEQ ID NO: 3677 - RNA, 19 nt, Artificial Sequence
  synthetic
auuauccucagguaguggu

SEQ ID NO: 3678 - RNA, 19 nt, Artificial Sequence
  synthetic
cauuauccucagguagugg

SEQ ID NO: 3679 - RNA, 19 nt, Artificial Sequence
  synthetic
ucauuauccucagguagug

SEQ ID NO: 3680 - RNA, 19 nt, Artificial Sequence
  synthetic
cucauuauccucagguagu

SEQ ID NO: 3681 - RNA, 19 nt, Artificial Sequence
  synthetic
gcucauuauccucagguag

SEQ ID NO: 3682 - RNA, 19 nt, Artificial Sequence
  synthetic
ggcucauuauccucaggua

SEQ ID NO: 3683 - RNA, 19 nt, Artificial Sequence
  synthetic
uggcucauuauccucaggu

SEQ ID NO: 3684 - RNA, 19 nt, Artificial Sequence
  synthetic
uuggcucauuauccucagg

SEQ ID NO: 3685 - RNA, 19 nt, Artificial Sequence
  synthetic
cuuggcucauuauccucag

SEQ ID NO: 3686 - RNA, 19 nt, Artificial Sequence
  synthetic
acuuggcucauuauccuca

SEQ ID NO: 3687 - RNA, 19 nt, Artificial Sequence
  synthetic
cacuuggcucauuauccuc

SEQ ID NO: 3688 - RNA, 19 nt, Artificial Sequence
  synthetic
ccacuuggcucauuauccu

SEQ ID NO: 3689 - RNA, 19 nt, Artificial Sequence
  synthetic
uccacuuggcucauuaucc

SEQ ID NO: 3690 - RNA, 19 nt, Artificial Sequence
  synthetic
auccacuuggcucauuauc

SEQ ID NO: 3691 - RNA, 19 nt, Artificial Sequence
  synthetic
uauccacuuggcucauuau

SEQ ID NO: 3692 - RNA, 19 nt, Artificial Sequence
  synthetic
auauccacuuggcucauua

SEQ ID NO: 3693 - RNA, 19 nt, Artificial Sequence
  synthetic
cauauccacuuggcucauu

SEQ ID NO: 3694 - RNA, 19 nt, Artificial Sequence
  synthetic
gcauauccacuuggcucau

SEQ ID NO: 3695 - RNA, 19 nt, Artificial Sequence
  synthetic
ugcauauccacuuggcuca

SEQ ID NO: 3696 - RNA, 19 nt, Artificial Sequence
  synthetic
gugcauauccacuuggcuc

SEQ ID NO: 3697 - RNA, 19 nt, Artificial Sequence
  synthetic
ugugcauauccacuuggcu

SEQ ID NO: 3698 - RNA, 19 nt, Artificial Sequence
  synthetic
uugugcauauccacuuggc

SEQ ID NO: 3699 - RNA, 19 nt, Artificial Sequence
  synthetic
uuugugcauauccacuugg

SEQ ID NO: 3700 - RNA, 19 nt, Artificial Sequence
  synthetic
guuugugcauauccacuug

SEQ ID NO: 3701 - RNA, 19 nt, Artificial Sequence
  synthetic
uguuugugcauauccacuu

SEQ ID NO: 3702 - RNA, 19 nt, Artificial Sequence
  synthetic
cuguuugugcauauccacu

SEQ ID NO: 3703 - RNA, 19 nt, Artificial Sequence
  synthetic
ucuguuugugcauauccac

SEQ ID NO: 3704 - RNA, 19 nt, Artificial Sequence
  synthetic
gucuguuugugcauaucca

SEQ ID NO: 3705 - RNA, 19 nt, Artificial Sequence
  synthetic
agucuguuugugcauaucc

SEQ ID NO: 3706 - RNA, 19 nt, Artificial Sequence
  synthetic
cagucuguuugugcauauc

SEQ ID NO: 3707 - RNA, 19 nt, Artificial Sequence
  synthetic
acagucuguuugugcauau

SEQ ID NO: 3708 - RNA, 19 nt, Artificial Sequence
  synthetic
cacagucuguuugugcaua

SEQ ID NO: 3709 - RNA, 19 nt, Artificial Sequence
  synthetic
acacagucuguuugugcau

SEQ ID NO: 3710 - RNA, 19 nt, Artificial Sequence
  synthetic
gacacagucuguuugugca

SEQ ID NO: 3711 - RNA, 19 nt, Artificial Sequence
  synthetic
ggacacagucuguuugugc

SEQ ID NO: 3712 - RNA, 19 nt, Artificial Sequence
  synthetic
aggacacagucuguuugug

SEQ ID NO: 3713 - RNA, 19 nt, Artificial Sequence
  synthetic
caggacacagucuguuugu

SEQ ID NO: 3714 - RNA, 19 nt, Artificial Sequence
  synthetic
ccaggacacagucuguuug

SEQ ID NO: 3715 - RNA, 19 nt, Artificial Sequence
  synthetic
uccaggacacagucuguuu

SEQ ID NO: 3716 - RNA, 19 nt, Artificial Sequence
  synthetic
cuccaggacacagucuguu

SEQ ID NO: 3717 - RNA, 19 nt, Artificial Sequence
  synthetic
ccuccaggacacagucugu

SEQ ID NO: 3718 - RNA, 19 nt, Artificial Sequence
  synthetic
gccuccaggacacagucug

SEQ ID NO: 3719 - RNA, 19 nt, Artificial Sequence
  synthetic
agccuccaggacacagucu

SEQ ID NO: 3720 - RNA, 19 nt, Artificial Sequence
  synthetic
uagccuccaggacacaguc

SEQ ID NO: 3721 - RNA, 19 nt, Artificial Sequence
  synthetic
auagccuccaggacacagu

SEQ ID NO: 3722 - RNA, 19 nt, Artificial Sequence
  synthetic
cauagccuccaggacacag

SEQ ID NO: 3723 - RNA, 19 nt, Artificial Sequence
  synthetic
ccauagccuccaggacaca

SEQ ID NO: 3724 - RNA, 19 nt, Artificial Sequence
  synthetic
gccauagccuccaggacac

SEQ ID NO: 3725 - RNA, 19 nt, Artificial Sequence
  synthetic
ggccauagccuccaggaca

SEQ ID NO: 3726 - RNA, 19 nt, Artificial Sequence
  synthetic
aggccauagccuccaggac

SEQ ID NO: 3727 - RNA, 19 nt, Artificial Sequence
  synthetic
aaggccauagccuccagga

SEQ ID NO: 3728 - RNA, 19 nt, Artificial Sequence
  synthetic
gaaggccauagccuccagg

SEQ ID NO: 3729 - RNA, 19 nt, Artificial Sequence
  synthetic
ggaaggccauagccuccag

SEQ ID NO: 3730 - RNA, 19 nt, Artificial Sequence
  synthetic
aggaaggccauagccucca

SEQ ID NO: 3731 - RNA, 19 nt, Artificial Sequence
  synthetic
aaggaaggccauagccucc

SEQ ID NO: 3732 - RNA, 19 nt, Artificial Sequence
  synthetic
caaggaaggccauagccuc

SEQ ID NO: 3733 - RNA, 19 nt, Artificial Sequence
  synthetic
ucaaggaaggccauagccu

SEQ ID NO: 3734 - RNA, 19 nt, Artificial Sequence
  synthetic
uucaaggaaggccauagcc

SEQ ID NO: 3735 - RNA, 19 nt, Artificial Sequence
  synthetic
cuucaaggaaggccauagc

SEQ ID NO: 3736 - RNA, 19 nt, Artificial Sequence
  synthetic
ucuucaaggaaggccauag

SEQ ID NO: 3737 - RNA, 19 nt, Artificial Sequence
  synthetic
uucuucaaggaaggccaua

SEQ ID NO: 3738 - RNA, 19 nt, Artificial Sequence
  synthetic
auucuucaaggaaggccau

SEQ ID NO: 3739 - RNA, 19 nt, Artificial Sequence
  synthetic
gauucuucaaggaaggcca

SEQ ID NO: 3740 - RNA, 19 nt, Artificial Sequence
  synthetic
ggauucuucaaggaaggcc

SEQ ID NO: 3741 - RNA, 19 nt, Artificial Sequence
  synthetic
gggauucuucaaggaaggc

SEQ ID NO: 3742 - RNA, 19 nt, Artificial Sequence
  synthetic
ugggauucuucaaggaagg

SEQ ID NO: 3743 - RNA, 19 nt, Artificial Sequence
  synthetic
gugggauucuucaaggaag

SEQ ID NO: 3744 - RNA, 19 nt, Artificial Sequence
  synthetic
ggugggauucuucaaggaa

SEQ ID NO: 3745 - RNA, 19 nt, Artificial Sequence
  synthetic
gggugggauucuucaagga

SEQ ID NO: 3746 - RNA, 19 nt, Artificial Sequence
  synthetic
ugggugggauucuucaagg

SEQ ID NO: 3747 - RNA, 19 nt, Artificial Sequence
  synthetic
cugggugggauucuucaag

SEQ ID NO: 3748 - RNA, 19 nt, Artificial Sequence
  synthetic
ccugggugggauucuucaa

SEQ ID NO: 3749 - RNA, 19 nt, Artificial Sequence
  synthetic
agaucccugggugggauuc

SEQ ID NO: 3750 - RNA, 19 nt, Artificial Sequence
  synthetic
ggcaugaguucucaaagau

SEQ ID NO: 3751 - RNA, 19 nt, Artificial Sequence
  synthetic
aggcaugaguucucaaaga

SEQ ID NO: 3752 - RNA, 19 nt, Artificial Sequence
  synthetic
aaggcaugaguucucaaag

SEQ ID NO: 3753 - RNA, 19 nt, Artificial Sequence
  synthetic
caaggcaugaguucucaaa

SEQ ID NO: 3754 - RNA, 19 nt, Artificial Sequence
  synthetic
ucaaggcaugaguucucaa

SEQ ID NO: 3755 - RNA, 19 nt, Artificial Sequence
  synthetic
uucaaggcaugaguucuca

SEQ ID NO: 3756 - RNA, 19 nt, Artificial Sequence
  synthetic
uuucaaggcaugaguucuc

SEQ ID NO: 3757 - RNA, 19 nt, Artificial Sequence
  synthetic
guuucaaggcaugaguucu

SEQ ID NO: 3758 - RNA, 19 nt, Artificial Sequence
  synthetic
uguuucaaggcaugaguuc

SEQ ID NO: 3759 - RNA, 19 nt, Artificial Sequence
  synthetic
uuguuucaaggcaugaguu

SEQ ID NO: 3760 - RNA, 19 nt, Artificial Sequence
  synthetic
auuguuucaaggcaugagu

SEQ ID NO: 3761 - RNA, 19 nt, Artificial Sequence
  synthetic
cauuguuucaaggcaugag

SEQ ID NO: 3762 - RNA, 19 nt, Artificial Sequence
  synthetic
ccauuguuucaaggcauga

SEQ ID NO: 3763 - RNA, 19 nt, Artificial Sequence
  synthetic
uccauuguuucaaggcaug

SEQ ID NO: 3764 - RNA, 19 nt, Artificial Sequence
  synthetic
uuccauuguuucaaggcau

SEQ ID NO: 3765 - RNA, 19 nt, Artificial Sequence
  synthetic
cuuccauuguuucaaggca

SEQ ID NO: 3766 - RNA, 19 nt, Artificial Sequence
  synthetic
acuuccauuguuucaaggc

SEQ ID NO: 3767 - RNA, 19 nt, Artificial Sequence
  synthetic
gaacgacuuccauuguuuc

SEQ ID NO: 3768 - RNA, 19 nt, Artificial Sequence
  synthetic
uguccacccuuguuuguug

SEQ ID NO: 3769 - RNA, 19 nt, Artificial Sequence
  synthetic
guuuguccacccuuguuug

SEQ ID NO: 3770 - RNA, 19 nt, Artificial Sequence
  synthetic
aguuuguccacccuuguuu

SEQ ID NO: 3771 - RNA, 19 nt, Artificial Sequence
  synthetic
ggcgaccuugaguuaguuu

SEQ ID NO: 3772 - RNA, 19 nt, Artificial Sequence
  synthetic
uccaaucauaagucuggcg

SEQ ID NO: 3773 - RNA, 19 nt, Artificial Sequence
  synthetic
guccaaucauaagucuggc

SEQ ID NO: 3774 - RNA, 19 nt, Artificial Sequence
  synthetic
uguccaaucauaagucugg

SEQ ID NO: 3775 - RNA, 19 nt, Artificial Sequence
  synthetic
auguccaaucauaagucug

SEQ ID NO: 3776 - RNA, 19 nt, Artificial Sequence
  synthetic
aauguccaaucauaagucu

SEQ ID NO: 3777 - RNA, 19 nt, Artificial Sequence
  synthetic
uaauguccaaucauaaguc

SEQ ID NO: 3778 - RNA, 19 nt, Artificial Sequence
  synthetic
uuaauguccaaucauaagu

SEQ ID NO: 3779 - RNA, 19 nt, Artificial Sequence
  synthetic
uuuaauguccaaucauaag

SEQ ID NO: 3780 - RNA, 19 nt, Artificial Sequence
  synthetic
ccgguugauuucuguuuaa

SEQ ID NO: 3781 - RNA, 19 nt, Artificial Sequence
  synthetic
uggcuaaugcaguugcugc

SEQ ID NO: 3782 - RNA, 19 nt, Artificial Sequence
  synthetic
cuucuaugguguuggcuaa

SEQ ID NO: 3783 - RNA, 19 nt, Artificial Sequence
  synthetic
acuucuaugguguuggcua

SEQ ID NO: 3784 - RNA, 19 nt, Artificial Sequence
  synthetic
aacuucuaugguguuggcu

SEQ ID NO: 3785 - RNA, 19 nt, Artificial Sequence
  synthetic
aaacuucuaugguguuggc

SEQ ID NO: 3786 - RNA, 19 nt, Artificial Sequence
  synthetic
aaaacuucuaugguguugg

SEQ ID NO: 3787 - RNA, 19 nt, Artificial Sequence
  synthetic
aaaaacuucuaugguguug

SEQ ID NO: 3788 - RNA, 19 nt, Artificial Sequence
  synthetic
uaaaaacuucuaugguguu

SEQ ID NO: 3789 - RNA, 19 nt, Artificial Sequence
  synthetic
cuaaaaacuucuauggugu

SEQ ID NO: 3790 - RNA, 19 nt, Artificial Sequence
  synthetic
ucuaaaaacuucuauggug

SEQ ID NO: 3791 - RNA, 19 nt, Artificial Sequence
  synthetic
aucuaaaaacuucuauggu

SEQ ID NO: 3792 - RNA, 19 nt, Artificial Sequence
  synthetic
gaucuaaaaacuucuaugg

SEQ ID NO: 3793 - RNA, 19 nt, Artificial Sequence
  synthetic
cgaucuaaaaacuucuaug

SEQ ID NO: 3794 - RNA, 19 nt, Artificial Sequence
  synthetic
ucgaucuaaaaacuucuau

SEQ ID NO: 3795 - RNA, 19 nt, Artificial Sequence
  synthetic
uucgaucuaaaaacuucua

SEQ ID NO: 3796 - RNA, 19 nt, Artificial Sequence
  synthetic
auucgaucuaaaaacuucu

SEQ ID NO: 3797 - RNA, 19 nt, Artificial Sequence
  synthetic
cauucgaucuaaaaacuuc

SEQ ID NO: 3798 - RNA, 19 nt, Artificial Sequence
  synthetic
ccauucgaucuaaaaacuu

SEQ ID NO: 3799 - RNA, 19 nt, Artificial Sequence
  synthetic
cuguuagaccauucgaucu

SEQ ID NO: 3800 - RNA, 19 nt, Artificial Sequence
  synthetic
gccuucccgauucauuagc

SEQ ID NO: 3801 - RNA, 19 nt, Artificial Sequence
  synthetic
ggaaaucuauuagccuucc

SEQ ID NO: 3802 - RNA, 19 nt, Artificial Sequence
  synthetic
aggaaaucuauuagccuuc

SEQ ID NO: 3803 - RNA, 19 nt, Artificial Sequence
  synthetic
gaggaaaucuauuagccuu

SEQ ID NO: 3804 - RNA, 19 nt, Artificial Sequence
  synthetic
ugaggaaaucuauuagccu

SEQ ID NO: 3805 - RNA, 19 nt, Artificial Sequence
  synthetic
uugaggaaaucuauuagcc

SEQ ID NO: 3806 - RNA, 19 nt, Artificial Sequence
  synthetic
cuugaggaaaucuauuagc

SEQ ID NO: 3807 - RNA, 19 nt, Artificial Sequence
  synthetic
ccuugaggaaaucuauuag

SEQ ID NO: 3808 - RNA, 19 nt, Artificial Sequence
  synthetic
uccuugaggaaaucuauua

SEQ ID NO: 3809 - RNA, 19 nt, Artificial Sequence
  synthetic
auccuugaggaaaucuauu

SEQ ID NO: 3810 - RNA, 19 nt, Artificial Sequence
  synthetic
cauccuugaggaaaucuau

SEQ ID NO: 3811 - RNA, 19 nt, Artificial Sequence
  synthetic
acauccuugaggaaaucua

SEQ ID NO: 3812 - RNA, 19 nt, Artificial Sequence
  synthetic
cacauccuugaggaaaucu

SEQ ID NO: 3813 - RNA, 19 nt, Artificial Sequence
  synthetic
ucacauccuugaggaaauc

SEQ ID NO: 3814 - RNA, 19 nt, Artificial Sequence
  synthetic
aucacauccuugaggaaau

SEQ ID NO: 3815 - RNA, 19 nt, Artificial Sequence
  synthetic
caucacauccuugaggaaa

SEQ ID NO: 3816 - RNA, 19 nt, Artificial Sequence
  synthetic
ccaucacauccuugaggaa

SEQ ID NO: 3817 - RNA, 19 nt, Artificial Sequence
  synthetic
uccaucacauccuugagga

SEQ ID NO: 3818 - RNA, 19 nt, Artificial Sequence
  synthetic
ccauugauuccaucacauc

SEQ ID NO: 3819 - RNA, 19 nt, Artificial Sequence
  synthetic
cuuuauccauugauuccau

SEQ ID NO: 3820 - RNA, 19 nt, Artificial Sequence
  synthetic
ucuuuauccauugauucca

SEQ ID NO: 3821 - RNA, 19 nt, Artificial Sequence
  synthetic
cucuuuauccauugauucc

SEQ ID NO: 3822 - RNA, 19 nt, Artificial Sequence
  synthetic
ccucuuuauccauugauuc

SEQ ID NO: 3823 - RNA, 19 nt, Artificial Sequence
  synthetic
uccucuuuauccauugauu

SEQ ID NO: 3824 - RNA, 19 nt, Artificial Sequence
  synthetic
uuccucuuuauccauugau

SEQ ID NO: 3825 - RNA, 19 nt, Artificial Sequence
  synthetic
uuuccucuuuauccauuga

SEQ ID NO: 3826 - RNA, 19 nt, Artificial Sequence
  synthetic
auuuccucuuuauccauug

SEQ ID NO: 3827 - RNA, 19 nt, Artificial Sequence
  synthetic
ucucuauuuccucuuuauc

SEQ ID NO: 3828 - RNA, 19 nt, Artificial Sequence
  synthetic
gaaaguguguuguuaucuc

SEQ ID NO: 3829 - RNA, 19 nt, Artificial Sequence
  synthetic
ugaaaguguguuguuaucu

SEQ ID NO: 3830 - RNA, 19 nt, Artificial Sequence
  synthetic
uugaaaguguguuguuauc

SEQ ID NO: 3831 - RNA, 19 nt, Artificial Sequence
  synthetic
uuugaaaguguguuguuau

SEQ ID NO: 3832 - RNA, 19 nt, Artificial Sequence
  synthetic
cuuugaaaguguguuguua

SEQ ID NO: 3833 - RNA, 19 nt, Artificial Sequence
  synthetic
ucuuugaaaguguguuguu

SEQ ID NO: 3834 - RNA, 19 nt, Artificial Sequence
  synthetic
uucuuugaaaguguguugu

SEQ ID NO: 3835 - RNA, 19 nt, Artificial Sequence
  synthetic
uuucuuugaaaguguguug

SEQ ID NO: 3836 - RNA, 19 nt, Artificial Sequence
  synthetic
uuuucuuugaaaguguguu

SEQ ID NO: 3837 - RNA, 19 nt, Artificial Sequence
  synthetic
uuuuucuuugaaagugugu

SEQ ID NO: 3838 - RNA, 19 nt, Artificial Sequence
  synthetic
cuuuuucuuugaaagugug

SEQ ID NO: 3839 - RNA, 19 nt, Artificial Sequence
  synthetic
ccuuuuucuuugaaagugu

SEQ ID NO: 3840 - RNA, 19 nt, Artificial Sequence
  synthetic
uccuuuuucuuugaaagug

SEQ ID NO: 3841 - RNA, 19 nt, Artificial Sequence
  synthetic
cuccuuuuucuuugaaagu

SEQ ID NO: 3842 - RNA, 19 nt, Artificial Sequence
  synthetic
ucuccuuuuucuuugaaag

SEQ ID NO: 3843 - RNA, 19 nt, Artificial Sequence
  synthetic
cucuccuuuuucuuugaaa

SEQ ID NO: 3844 - RNA, 19 nt, Artificial Sequence
  synthetic
acucuccuuuuucuuugaa

SEQ ID NO: 3845 - RNA, 19 nt, Artificial Sequence
  synthetic
uacucuccuuuuucuuuga

SEQ ID NO: 3846 - RNA, 19 nt, Artificial Sequence
  synthetic
uuacucuccuuuuucuuug

SEQ ID NO: 3847 - RNA, 19 nt, Artificial Sequence
  synthetic
cuuacucuccuuuuucuuu

SEQ ID NO: 3848 - RNA, 19 nt, Artificial Sequence
  synthetic
ucuuacucuccuuuuucuu

SEQ ID NO: 3849 - RNA, 19 nt, Artificial Sequence
  synthetic
cucuuacucuccuuuuucu

SEQ ID NO: 3850 - RNA, 19 nt, Artificial Sequence
  synthetic
ucucuuacucuccuuuuuc

SEQ ID NO: 3851 - RNA, 19 nt, Artificial Sequence
  synthetic
gucucuuacucuccuuuuu

SEQ ID NO: 3852 - RNA, 19 nt, Artificial Sequence
  synthetic
ugucucuuacucuccuuuu

SEQ ID NO: 3853 - RNA, 19 nt, Artificial Sequence
  synthetic
uugucucuuacucuccuuu

SEQ ID NO: 3854 - RNA, 19 nt, Artificial Sequence
  synthetic
guugucucuuacucuccuu

SEQ ID NO: 3855 - RNA, 19 nt, Artificial Sequence
  synthetic
uguugucucuuacucuccu

SEQ ID NO: 3856 - RNA, 19 nt, Artificial Sequence
  synthetic
auguugucucuuacucucc

SEQ ID NO: 3857 - RNA, 19 nt, Artificial Sequence
  synthetic
cauguugucucuuacucuc

SEQ ID NO: 3858 - RNA, 19 nt, Artificial Sequence
  synthetic
ucauguugucucuuacucu

SEQ ID NO: 3859 - RNA, 19 nt, Artificial Sequence
  synthetic
gucauguugucucuuacuc

SEQ ID NO: 3860 - RNA, 19 nt, Artificial Sequence
  synthetic
ggucauguugucucuuacu

SEQ ID NO: 3861 - RNA, 19 nt, Artificial Sequence
  synthetic
uggucauguugucucuuac

SEQ ID NO: 3862 - RNA, 19 nt, Artificial Sequence
  synthetic
uuggucauguugucucuua

SEQ ID NO: 3863 - RNA, 19 nt, Artificial Sequence
  synthetic
cuuggucauguugucucuu

SEQ ID NO: 3864 - RNA, 19 nt, Artificial Sequence
  synthetic
ucuuggucauguugucucu

SEQ ID NO: 3865 - RNA, 19 nt, Artificial Sequence
  synthetic
uucuuggucauguugucuc

SEQ ID NO: 3866 - RNA, 19 nt, Artificial Sequence
  synthetic
uuucuuggucauguugucu

SEQ ID NO: 3867 - RNA, 19 nt, Artificial Sequence
  synthetic
uuuucuuggucauguuguc

SEQ ID NO: 3868 - RNA, 19 nt, Artificial Sequence
  synthetic
auuuucuuggucauguugu

SEQ ID NO: 3869 - RNA, 19 nt, Artificial Sequence
  synthetic
cauuuucuuggucauguug

SEQ ID NO: 3870 - RNA, 19 nt, Artificial Sequence
  synthetic
ccauuuucuuggucauguu

SEQ ID NO: 3871 - RNA, 19 nt, Artificial Sequence
  synthetic
accauuuucuuggucaugu

SEQ ID NO: 3872 - RNA, 19 nt, Artificial Sequence
  synthetic
gaccauuuucuuggucaug

SEQ ID NO: 3873 - RNA, 19 nt, Artificial Sequence
  synthetic
ugaccauuuucuuggucau

SEQ ID NO: 3874 - RNA, 19 nt, Artificial Sequence
  synthetic
gugaccauuuucuugguca

SEQ ID NO: 3875 - RNA, 19 nt, Artificial Sequence
  synthetic
ugugaccauuuucuugguc

SEQ ID NO: 3876 - RNA, 19 nt, Artificial Sequence
  synthetic
gugugaccauuuucuuggu

SEQ ID NO: 3877 - RNA, 19 nt, Artificial Sequence
  synthetic
ugugugaccauuuucuugg

SEQ ID NO: 3878 - RNA, 19 nt, Artificial Sequence
  synthetic
uugugugaccauuuucuug

SEQ ID NO: 3879 - RNA, 19 nt, Artificial Sequence
  synthetic
uuugugugaccauuuucuu

SEQ ID NO: 3880 - RNA, 19 nt, Artificial Sequence
  synthetic
cuuugugugaccauuuucu

SEQ ID NO: 3881 - RNA, 19 nt, Artificial Sequence
  synthetic
ucuuugugugaccauuuuc

SEQ ID NO: 3882 - RNA, 19 nt, Artificial Sequence
  synthetic
uucuuugugugaccauuuu

SEQ ID NO: 3883 - RNA, 19 nt, Artificial Sequence
  synthetic
guucuuugugugaccauuu

SEQ ID NO: 3884 - RNA, 19 nt, Artificial Sequence
  synthetic
uguucuuugugugaccauu

SEQ ID NO: 3885 - RNA, 19 nt, Artificial Sequence
  synthetic
uuguucuuugugugaccau

SEQ ID NO: 3886 - RNA, 19 nt, Artificial Sequence
  synthetic
auuguucuuugugugacca

SEQ ID NO: 3887 - RNA, 19 nt, Artificial Sequence
  synthetic
uauuguucuuugugugacc

SEQ ID NO: 3888 - RNA, 19 nt, Artificial Sequence
  synthetic
cuauuguucuuugugugac

SEQ ID NO: 3889 - RNA, 19 nt, Artificial Sequence
  synthetic
ccuauuguucuuuguguga

SEQ ID NO: 3890 - RNA, 19 nt, Artificial Sequence
  synthetic
uuuguuuuuucuuuccuau

SEQ ID NO: 3891 - RNA, 19 nt, Artificial Sequence
  synthetic
ucacucuuuguuuuuucuu

SEQ ID NO: 3892 - RNA, 19 nt, Artificial Sequence
  synthetic
uucacucuuuguuuuuucu

SEQ ID NO: 3893 - RNA, 19 nt, Artificial Sequence
  synthetic
auucacucuuuguuuuuuc

SEQ ID NO: 3894 - RNA, 19 nt, Artificial Sequence
  synthetic
uauucacucuuuguuuuuu

SEQ ID NO: 3895 - RNA, 19 nt, Artificial Sequence
  synthetic
uuauucacucuuuguuuuu

SEQ ID NO: 3896 - RNA, 19 nt, Artificial Sequence
  synthetic
cuuauucacucuuuguuuu

SEQ ID NO: 3897 - RNA, 19 nt, Artificial Sequence
  synthetic
ucuuauucacucuuuguuu

SEQ ID NO: 3898 - RNA, 19 nt, Artificial Sequence
  synthetic
cucuuauucacucuuuguu

SEQ ID NO: 3899 - RNA, 19 nt, Artificial Sequence
  synthetic
ucucuuauucacucuuugu

SEQ ID NO: 3900 - RNA, 19 nt, Artificial Sequence
  synthetic
cucucuuauucacucuuug

SEQ ID NO: 3901 - RNA, 19 nt, Artificial Sequence
  synthetic
ccucucuuauucacucuuu

SEQ ID NO: 3902 - RNA, 19 nt, Artificial Sequence
  synthetic
gccucucuuauucacucuu

SEQ ID NO: 3903 - RNA, 19 nt, Artificial Sequence
  synthetic
agccucucuuauucacucu

SEQ ID NO: 3904 - RNA, 19 nt, Artificial Sequence
  synthetic
uagccucucuuauucacuc

SEQ ID NO: 3905 - RNA, 19 nt, Artificial Sequence
  synthetic
ucaaagcucuuauuagaua

SEQ ID NO: 3906 - RNA, 19 nt, Artificial Sequence
  synthetic
augucaaagcucuuauuag

SEQ ID NO: 3907 - RNA, 19 nt, Artificial Sequence
  synthetic
aaugucaaagcucuuauua

SEQ ID NO: 3908 - RNA, 19 nt, Artificial Sequence
  synthetic
caaugucaaagcucuuauu

SEQ ID NO: 3909 - RNA, 19 nt, Artificial Sequence
  synthetic
ucaaugucaaagcucuuau

SEQ ID NO: 3910 - RNA, 19 nt, Artificial Sequence
  synthetic
uucaaugucaaagcucuua

SEQ ID NO: 3911 - RNA, 19 nt, Artificial Sequence
  synthetic
guucaaugucaaagcucuu

SEQ ID NO: 3912 - RNA, 19 nt, Artificial Sequence
  synthetic
uguucaaugucaaagcucu

SEQ ID NO: 3913 - RNA, 19 nt, Artificial Sequence
  synthetic
guguucaaugucaaagcuc

SEQ ID NO: 3914 - RNA, 19 nt, Artificial Sequence
  synthetic
cguguucaaugucaaagcu

SEQ ID NO: 3915 - RNA, 19 nt, Artificial Sequence
  synthetic
ucguguucaaugucaaagc

SEQ ID NO: 3916 - RNA, 19 nt, Artificial Sequence
  synthetic
aucguguucaaugucaaag

SEQ ID NO: 3917 - RNA, 19 nt, Artificial Sequence
  synthetic
caucguguucaaugucaaa

SEQ ID NO: 3918 - RNA, 19 nt, Artificial Sequence
  synthetic
ucaucguguucaaugucaa

SEQ ID NO: 3919 - RNA, 19 nt, Artificial Sequence
  synthetic
gucaucguguucaauguca

SEQ ID NO: 3920 - RNA, 19 nt, Artificial Sequence
  synthetic
ggucaucguguucaauguc

SEQ ID NO: 3921 - RNA, 19 nt, Artificial Sequence
  synthetic
uggucaucguguucaaugu

SEQ ID NO: 3922 - RNA, 19 nt, Artificial Sequence
  synthetic
uuggucaucguguucaaug

SEQ ID NO: 3923 - RNA, 19 nt, Artificial Sequence
  synthetic
uuuggucaucguguucaau

SEQ ID NO: 3924 - RNA, 19 nt, Artificial Sequence
  synthetic
cuuuggucaucguguucaa

SEQ ID NO: 3925 - RNA, 19 nt, Artificial Sequence
  synthetic
ucuuuggucaucguguuca

SEQ ID NO: 3926 - RNA, 19 nt, Artificial Sequence
  synthetic
aucuuuggucaucguguuc

SEQ ID NO: 3927 - RNA, 19 nt, Artificial Sequence
  synthetic
caucuuuggucaucguguu

SEQ ID NO: 3928 - RNA, 19 nt, Artificial Sequence
  synthetic
gcaucuuuggucaucgugu

SEQ ID NO: 3929 - RNA, 19 nt, Artificial Sequence
  synthetic
ugcaucuuuggucaucgug

SEQ ID NO: 3930 - RNA, 19 nt, Artificial Sequence
  synthetic
cugcaucuuuggucaucgu

SEQ ID NO: 3931 - RNA, 19 nt, Artificial Sequence
  synthetic
ucugcaucuuuggucaucg

SEQ ID NO: 3932 - RNA, 19 nt, Artificial Sequence
  synthetic
ucucugcaucuuuggucau

SEQ ID NO: 3933 - RNA, 19 nt, Artificial Sequence
  synthetic
cucucugcaucuuugguca

SEQ ID NO: 3934 - RNA, 19 nt, Artificial Sequence
  synthetic
ucucucugcaucuuugguc

SEQ ID NO: 3935 - RNA, 19 nt, Artificial Sequence
  synthetic
cucucucugcaucuuuggu

SEQ ID NO: 3936 - RNA, 19 nt, Artificial Sequence
  synthetic
ccucucucugcaucuuugg

SEQ ID NO: 3937 - RNA, 19 nt, Artificial Sequence
  synthetic
uaccucucucugcaucuuu

SEQ ID NO: 3938 - RNA, 19 nt, Artificial Sequence
  synthetic
uagcccuucuuuuuaauuu

SEQ ID NO: 3939 - RNA, 19 nt, Artificial Sequence
  synthetic
auagcccuucuuuuuaauu

SEQ ID NO: 3940 - RNA, 19 nt, Artificial Sequence
  synthetic
aauagcccuucuuuuuaau

SEQ ID NO: 3941 - RNA, 19 nt, Artificial Sequence
  synthetic
caauagcccuucuuuuuaa

SEQ ID NO: 3942 - RNA, 19 nt, Artificial Sequence
  synthetic
gcaauagcccuucuuuuua

SEQ ID NO: 3943 - RNA, 19 nt, Artificial Sequence
  synthetic
ugcaauagcccuucuuuuu

SEQ ID NO: 3944 - RNA, 19 nt, Artificial Sequence
  synthetic
uugcaauagcccuucuuuu

SEQ ID NO: 3945 - RNA, 19 nt, Artificial Sequence
  synthetic
guugcaauagcccuucuuu

SEQ ID NO: 3946 - RNA, 19 nt, Artificial Sequence
  synthetic
uguugcaauagcccuucuu

SEQ ID NO: 3947 - RNA, 19 nt, Artificial Sequence
  synthetic
guguugcaauagcccuucu

SEQ ID NO: 3948 - RNA, 19 nt, Artificial Sequence
  synthetic
gguguugcaauagcccuuc

SEQ ID NO: 3949 - RNA, 19 nt, Artificial Sequence
  synthetic
ggguguugcaauagcccuu

SEQ ID NO: 3950 - RNA, 19 nt, Artificial Sequence
  synthetic
cggguguugcaauagcccu

SEQ ID NO: 3951 - RNA, 19 nt, Artificial Sequence
  synthetic
ccggguguugcaauagccc

SEQ ID NO: 3952 - RNA, 19 nt, Artificial Sequence
  synthetic
cccggguguugcaauagcc

SEQ ID NO: 3953 - RNA, 19 nt, Artificial Sequence
  synthetic
ucccggguguugcaauagc

SEQ ID NO: 3954 - RNA, 19 nt, Artificial Sequence
  synthetic
aucccggguguugcaauag

SEQ ID NO: 3955 - RNA, 19 nt, Artificial Sequence
  synthetic
caucccggguguugcaaua

SEQ ID NO: 3956 - RNA, 19 nt, Artificial Sequence
  synthetic
gcaucccggguguugcaau

SEQ ID NO: 3957 - RNA, 19 nt, Artificial Sequence
  synthetic
ugcaucccggguguugcaa

SEQ ID NO: 3958 - RNA, 19 nt, Artificial Sequence
  synthetic
uugcaucccggguguugca

SEQ ID NO: 3959 - RNA, 19 nt, Artificial Sequence
  synthetic
uuugcaucccggguguugc

SEQ ID NO: 3960 - RNA, 19 nt, Artificial Sequence
  synthetic
auuugcaucccggguguug

SEQ ID NO: 3961 - RNA, 19 nt, Artificial Sequence
  synthetic
aauuugcaucccggguguu

SEQ ID NO: 3962 - RNA, 19 nt, Artificial Sequence
  synthetic
uaauuugcaucccgggugu

SEQ ID NO: 3963 - RNA, 19 nt, Artificial Sequence
  synthetic
cuaauuugcaucccgggug

SEQ ID NO: 3964 - RNA, 19 nt, Artificial Sequence
  synthetic
ucuaauuugcaucccgggu

SEQ ID NO: 3965 - RNA, 19 nt, Artificial Sequence
  synthetic
cucuaauuugcaucccggg

SEQ ID NO: 3966 - RNA, 19 nt, Artificial Sequence
  synthetic
ccucuaauuugcaucccgg

SEQ ID NO: 3967 - RNA, 19 nt, Artificial Sequence
  synthetic
acacgaacccucuaauuug

SEQ ID NO: 3968 - RNA, 19 nt, Artificial Sequence
  synthetic
uuucaacgaaguacacgaa

SEQ ID NO: 3969 - RNA, 19 nt, Artificial Sequence
  synthetic
guuucaacgaaguacacga

SEQ ID NO: 3970 - RNA, 19 nt, Artificial Sequence
  synthetic
aguuucaacgaaguacacg

SEQ ID NO: 3971 - RNA, 19 nt, Artificial Sequence
  synthetic
aaguuucaacgaaguacac

SEQ ID NO: 3972 - RNA, 19 nt, Artificial Sequence
  synthetic
aaaguuucaacgaaguaca

SEQ ID NO: 3973 - RNA, 19 nt, Artificial Sequence
  synthetic
uaaaguuucaacgaaguac

SEQ ID NO: 3974 - RNA, 19 nt, Artificial Sequence
  synthetic
cuaaaguuucaacgaagua

SEQ ID NO: 3975 - RNA, 19 nt, Artificial Sequence
  synthetic
gcuaaaguuucaacgaagu

SEQ ID NO: 3976 - RNA, 19 nt, Artificial Sequence
  synthetic
agcuaaaguuucaacgaag

SEQ ID NO: 3977 - RNA, 19 nt, Artificial Sequence
  synthetic
uagcuaaaguuucaacgaa

SEQ ID NO: 3978 - RNA, 19 nt, Artificial Sequence
  synthetic
cuagcuaaaguuucaacga

SEQ ID NO: 3979 - RNA, 19 nt, Artificial Sequence
  synthetic
ucuagcuaaaguuucaacg

SEQ ID NO: 3980 - RNA, 19 nt, Artificial Sequence
  synthetic
uucuagcuaaaguuucaac

SEQ ID NO: 3981 - RNA, 19 nt, Artificial Sequence
  synthetic
cuucuagcuaaaguuucaa

SEQ ID NO: 3982 - RNA, 19 nt, Artificial Sequence
  synthetic
gcuucuagcuaaaguuuca

SEQ ID NO: 3983 - RNA, 19 nt, Artificial Sequence
  synthetic
ugcuucuagcuaaaguuuc

SEQ ID NO: 3984 - RNA, 19 nt, Artificial Sequence
  synthetic
augcuucuagcuaaaguuu

SEQ ID NO: 3985 - RNA, 19 nt, Artificial Sequence
  synthetic
aaugcuucuagcuaaaguu

SEQ ID NO: 3986 - RNA, 19 nt, Artificial Sequence
  synthetic
aaaugcuucuagcuaaagu

SEQ ID NO: 3987 - RNA, 19 nt, Artificial Sequence
  synthetic
caaaugcuucuagcuaaag

SEQ ID NO: 3988 - RNA, 19 nt, Artificial Sequence
  synthetic
gcaaaugcuucuagcuaaa

SEQ ID NO: 3989 - RNA, 19 nt, Artificial Sequence
  synthetic
cgcaaaugcuucuagcuaa

SEQ ID NO: 3990 - RNA, 19 nt, Artificial Sequence
  synthetic
ucgcaaaugcuucuagcua

SEQ ID NO: 3991 - RNA, 19 nt, Artificial Sequence
  synthetic
uucgcaaaugcuucuagcu

SEQ ID NO: 3992 - RNA, 19 nt, Artificial Sequence
  synthetic
uuucgcaaaugcuucuagc

SEQ ID NO: 3993 - RNA, 19 nt, Artificial Sequence
  synthetic
uuuucgcaaaugcuucuag

SEQ ID NO: 3994 - RNA, 19 nt, Artificial Sequence
  synthetic
cuuuucgcaaaugcuucua

SEQ ID NO: 3995 - RNA, 19 nt, Artificial Sequence
  synthetic
gcuuuucgcaaaugcuucu

SEQ ID NO: 3996 - RNA, 19 nt, Artificial Sequence
  synthetic
agcuuuucgcaaaugcuuc

SEQ ID NO: 3997 - RNA, 19 nt, Artificial Sequence
  synthetic
aagcuuuucgcaaaugcuu

SEQ ID NO: 3998 - RNA, 19 nt, Artificial Sequence
  synthetic
caagcuuuucgcaaaugcu

SEQ ID NO: 3999 - RNA, 19 nt, Artificial Sequence
  synthetic
ucaagcuuuucgcaaaugc

SEQ ID NO: 4000 - RNA, 19 nt, Artificial Sequence
  synthetic
uucaagcuuuucgcaaaug

SEQ ID NO: 4001 - RNA, 19 nt, Artificial Sequence
  synthetic
guucaagcuuuucgcaaau

SEQ ID NO: 4002 - RNA, 19 nt, Artificial Sequence
  synthetic
uguucaagcuuuucgcaaa

SEQ ID NO: 4003 - RNA, 19 nt, Artificial Sequence
  synthetic
cuguucaagcuuuucgcaa

SEQ ID NO: 4004 - RNA, 19 nt, Artificial Sequence
  synthetic
acuguucaagcuuuucgca

SEQ ID NO: 4005 - RNA, 19 nt, Artificial Sequence
  synthetic
gacuguucaagcuuuucgc

SEQ ID NO: 4006 - RNA, 19 nt, Artificial Sequence
  synthetic
agacuguucaagcuuuucg

SEQ ID NO: 4007 - RNA, 19 nt, Artificial Sequence
  synthetic
cagacuguucaagcuuuuc

SEQ ID NO: 4008 - RNA, 19 nt, Artificial Sequence
  synthetic
ccagacuguucaagcuuuu

SEQ ID NO: 4009 - RNA, 19 nt, Artificial Sequence
  synthetic
uccagacuguucaagcuuu

SEQ ID NO: 4010 - RNA, 19 nt, Artificial Sequence
  synthetic
guccagacuguucaagcuu

SEQ ID NO: 4011 - RNA, 19 nt, Artificial Sequence
  synthetic
aguccagacuguucaagcu

SEQ ID NO: 4012 - RNA, 19 nt, Artificial Sequence
  synthetic
cauuacccccaaccggaag

SEQ ID NO: 4013 - RNA, 19 nt, Artificial Sequence
  synthetic
ccaguuuggccuucuuuuc

SEQ ID NO: 4014 - RNA, 19 nt, Artificial Sequence
  synthetic
uugccaguuuggccuucuu

SEQ ID NO: 4015 - RNA, 19 nt, Artificial Sequence
  synthetic
uuugccaguuuggccuucu

SEQ ID NO: 4016 - RNA, 19 nt, Artificial Sequence
  synthetic
auuugccaguuuggccuuc

SEQ ID NO: 4017 - RNA, 19 nt, Artificial Sequence
  synthetic
cauuugccaguuuggccuu

SEQ ID NO: 4018 - RNA, 19 nt, Artificial Sequence
  synthetic
acauuugccaguuuggccu

SEQ ID NO: 4019 - RNA, 19 nt, Artificial Sequence
  synthetic
aacauuugccaguuuggcc

SEQ ID NO: 4020 - RNA, 19 nt, Artificial Sequence
  synthetic
caacauuugccaguuuggc

SEQ ID NO: 4021 - RNA, 19 nt, Artificial Sequence
  synthetic
acaacauuugccaguuugg

SEQ ID NO: 4022 - RNA, 19 nt, Artificial Sequence
  synthetic
cacaacauuugccaguuug

SEQ ID NO: 4023 - RNA, 19 nt, Artificial Sequence
  synthetic
ucacaacauuugccaguuu

SEQ ID NO: 4024 - RNA, 19 nt, Artificial Sequence
  synthetic
cucacaacauuugccaguu

SEQ ID NO: 4025 - RNA, 19 nt, Artificial Sequence
  synthetic
ucucacaacauuugccagu

SEQ ID NO: 4026 - RNA, 19 nt, Artificial Sequence
  synthetic
uucucacaacauuugccag

SEQ ID NO: 4027 - RNA, 19 nt, Artificial Sequence
  synthetic
uuucucacaacauuugcca

SEQ ID NO: 4028 - RNA, 19 nt, Artificial Sequence
  synthetic
ucuuucucacaacauuugc

SEQ ID NO: 4029 - RNA, 19 nt, Artificial Sequence
  synthetic
cuugugaauuagucaucau

SEQ ID NO: 4030 - RNA, 19 nt, Artificial Sequence
  synthetic
ucuugugaauuagucauca

SEQ ID NO: 4031 - RNA, 19 nt, Artificial Sequence
  synthetic
gucuugugaauuagucauc

SEQ ID NO: 4032 - RNA, 19 nt, Artificial Sequence
  synthetic
ugucuugugaauuagucau

SEQ ID NO: 4033 - RNA, 19 nt, Artificial Sequence
  synthetic
gugucuugugaauuaguca

SEQ ID NO: 4034 - RNA, 19 nt, Artificial Sequence
  synthetic
ugaaagaaagcucuguguc

SEQ ID NO: 4035 - RNA, 19 nt, Artificial Sequence
  synthetic
ugauugugaaagaaagcuc

SEQ ID NO: 4036 - RNA, 19 nt, Artificial Sequence
  synthetic
gugauugugaaagaaagcu

SEQ ID NO: 4037 - RNA, 19 nt, Artificial Sequence
  synthetic
agugauugugaaagaaagc

SEQ ID NO: 4038 - RNA, 19 nt, Artificial Sequence
  synthetic
cagugauugugaaagaaag

SEQ ID NO: 4039 - RNA, 19 nt, Artificial Sequence
  synthetic
ccagugauugugaaagaaa

SEQ ID NO: 4040 - RNA, 19 nt, Artificial Sequence
  synthetic
cccagugauugugaaagaa

SEQ ID NO: 4041 - RNA, 19 nt, Artificial Sequence
  synthetic
ccccagugauugugaaaga

SEQ ID NO: 4042 - RNA, 19 nt, Artificial Sequence
  synthetic
uccccagugauugugaaag

SEQ ID NO: 4043 - RNA, 19 nt, Artificial Sequence
  synthetic
guccccagugauugugaaa

SEQ ID NO: 4044 - RNA, 19 nt, Artificial Sequence
  synthetic
uguccccagugauugugaa

SEQ ID NO: 4045 - RNA, 19 nt, Artificial Sequence
  synthetic
uuguccccagugauuguga

SEQ ID NO: 4046 - RNA, 19 nt, Artificial Sequence
  synthetic
uguuguccccagugauugu

SEQ ID NO: 4047 - RNA, 19 nt, Artificial Sequence
  synthetic
cauuccacuuaguguuguc

SEQ ID NO: 4048 - RNA, 19 nt, Artificial Sequence
  synthetic
ucauuccacuuaguguugu

SEQ ID NO: 4049 - RNA, 19 nt, Artificial Sequence
  synthetic
uucauuccacuuaguguug

SEQ ID NO: 4050 - RNA, 19 nt, Artificial Sequence
  synthetic
uuucauuccacuuaguguu

SEQ ID NO: 4051 - RNA, 19 nt, Artificial Sequence
  synthetic
uuuucauuccacuuagugu

SEQ ID NO: 4052 - RNA, 19 nt, Artificial Sequence
  synthetic
gauuuucauuccacuuagu

SEQ ID NO: 4053 - RNA, 19 nt, Artificial Sequence
  synthetic
agaacauucgaggguuuug

SEQ ID NO: 4054 - RNA, 19 nt, Artificial Sequence
  synthetic
uauauguaaucaucgccaa

SEQ ID NO: 4055 - RNA, 19 nt, Artificial Sequence
  synthetic
auauauguaaucaucgcca

SEQ ID NO: 4056 - RNA, 19 nt, Artificial Sequence
  synthetic
gauauauguaaucaucgcc

SEQ ID NO: 4057 - RNA, 19 nt, Artificial Sequence
  synthetic
ugauauauguaaucaucgc

SEQ ID NO: 4058 - RNA, 19 nt, Artificial Sequence
  synthetic
gugauauauguaaucaucg

SEQ ID NO: 4059 - RNA, 19 nt, Artificial Sequence
  synthetic
ugugauauauguaaucauc

SEQ ID NO: 4060 - RNA, 19 nt, Artificial Sequence
  synthetic
uugugauauauguaaucau

SEQ ID NO: 4061 - RNA, 19 nt, Artificial Sequence
  synthetic
uuugugauauauguaauca

SEQ ID NO: 4062 - RNA, 19 nt, Artificial Sequence
  synthetic
uuuugugauauauguaauc

SEQ ID NO: 4063 - RNA, 19 nt, Artificial Sequence
  synthetic
uuuuugugauauauguaau

SEQ ID NO: 4064 - RNA, 19 nt, Artificial Sequence
  synthetic
uuuuuugugauauauguaa

SEQ ID NO: 4065 - RNA, 19 nt, Artificial Sequence
  synthetic
auuuuuugugauauaugua

SEQ ID NO: 4066 - RNA, 19 nt, Artificial Sequence
  synthetic
gauuuuuugugauauaugu

SEQ ID NO: 4067 - RNA, 19 nt, Artificial Sequence
  synthetic
ugauuuuuugugauauaug

SEQ ID NO: 4068 - RNA, 19 nt, Artificial Sequence
  synthetic
uugauuuuuugugauauau

SEQ ID NO: 4069 - RNA, 19 nt, Artificial Sequence
  synthetic
guugauuuuuugugauaua

SEQ ID NO: 4070 - RNA, 19 nt, Artificial Sequence
  synthetic
gguugauuuuuugugauau

SEQ ID NO: 4071 - RNA, 19 nt, Artificial Sequence
  synthetic
agguugauuuuuugugaua

SEQ ID NO: 4072 - RNA, 19 nt, Artificial Sequence
  synthetic
cagguugauuuuuugugau

SEQ ID NO: 4073 - RNA, 19 nt, Artificial Sequence
  synthetic
ucagguugauuuuuuguga

SEQ ID NO: 4074 - RNA, 19 nt, Artificial Sequence
  synthetic
cucagguugauuuuuugug

SEQ ID NO: 4075 - RNA, 19 nt, Artificial Sequence
  synthetic
acucagguugauuuuuugu

SEQ ID NO: 4076 - RNA, 19 nt, Artificial Sequence
  synthetic
cacucagguugauuuuuug

SEQ ID NO: 4077 - RNA, 19 nt, Artificial Sequence
  synthetic
ccacucagguugauuuuuu

SEQ ID NO: 4078 - RNA, 19 nt, Artificial Sequence
  synthetic
accacucagguugauuuuu

SEQ ID NO: 4079 - RNA, 19 nt, Artificial Sequence
  synthetic
aaccacucagguugauuuu

SEQ ID NO: 4080 - RNA, 19 nt, Artificial Sequence
  synthetic
gaaccacucagguugauuu

SEQ ID NO: 4081 - RNA, 19 nt, Artificial Sequence
  synthetic
ugaaccacucagguugauu

SEQ ID NO: 4082 - RNA, 19 nt, Artificial Sequence
  synthetic
cugaaccacucagguugau

SEQ ID NO: 4083 - RNA, 19 nt, Artificial Sequence
  synthetic
ucugaaccacucagguuga

SEQ ID NO: 4084 - RNA, 19 nt, Artificial Sequence
  synthetic
uucugaaccacucagguug

SEQ ID NO: 4085 - RNA, 19 nt, Artificial Sequence
  synthetic
uuucugaaccacucagguu

SEQ ID NO: 4086 - RNA, 19 nt, Artificial Sequence
  synthetic
guuucugaaccacucaggu

SEQ ID NO: 4087 - RNA, 19 nt, Artificial Sequence
  synthetic
uguuucugaaccacucagg

SEQ ID NO: 4088 - RNA, 19 nt, Artificial Sequence
  synthetic
auguuucugaaccacucag

SEQ ID NO: 4089 - RNA, 19 nt, Artificial Sequence
  synthetic
gauguuucugaaccacuca

SEQ ID NO: 4090 - RNA, 19 nt, Artificial Sequence
  synthetic
ggauguuucugaaccacuc

SEQ ID NO: 4091 - RNA, 19 nt, Artificial Sequence
  synthetic
aggauguuucugaaccacu

SEQ ID NO: 4092 - RNA, 19 nt, Artificial Sequence
  synthetic
caggauguuucugaaccac

SEQ ID NO: 4093 - RNA, 19 nt, Artificial Sequence
  synthetic
ucaggauguuucugaacca

SEQ ID NO: 4094 - RNA, 19 nt, Artificial Sequence
  synthetic
cucaggauguuucugaacc

SEQ ID NO: 4095 - RNA, 19 nt, Artificial Sequence
  synthetic
gcucaggauguuucugaac

SEQ ID NO: 4096 - RNA, 19 nt, Artificial Sequence
  synthetic
ugcucaggauguuucugaa

SEQ ID NO: 4097 - RNA, 19 nt, Artificial Sequence
  synthetic
augcucaggauguuucuga

SEQ ID NO: 4098 - RNA, 19 nt, Artificial Sequence
  synthetic
gaugcucaggauguuucug

SEQ ID NO: 4099 - RNA, 19 nt, Artificial Sequence
  synthetic
cgaugcucaggauguuucu

SEQ ID NO: 4100 - RNA, 19 nt, Artificial Sequence
  synthetic
gcgaugcucaggauguuuc

SEQ ID NO: 4101 - RNA, 19 nt, Artificial Sequence
  synthetic
ugcgaugcucaggauguuu

SEQ ID NO: 4102 - RNA, 19 nt, Artificial Sequence
  synthetic
gugcgaugcucaggauguu

SEQ ID NO: 4103 - RNA, 19 nt, Artificial Sequence
  synthetic
ggugcgaugcucaggaugu

SEQ ID NO: 4104 - RNA, 19 nt, Artificial Sequence
  synthetic
uggugcgaugcucaggaug

SEQ ID NO: 4105 - RNA, 19 nt, Artificial Sequence
  synthetic
uuggugcgaugcucaggau

SEQ ID NO: 4106 - RNA, 19 nt, Artificial Sequence
  synthetic
auuggugcgaugcucagga

SEQ ID NO: 4107 - RNA, 19 nt, Artificial Sequence
  synthetic
uauuggugcgaugcucagg

SEQ ID NO: 4108 - RNA, 19 nt, Artificial Sequence
  synthetic
uuauuggugcgaugcucag

SEQ ID NO: 4109 - RNA, 19 nt, Artificial Sequence
  synthetic
auuauuggugcgaugcuca

SEQ ID NO: 4110 - RNA, 19 nt, Artificial Sequence
  synthetic
cauuauuggugcgaugcuc

SEQ ID NO: 4111 - RNA, 19 nt, Artificial Sequence
  synthetic
acauuauuggugcgaugcu

SEQ ID NO: 4112 - RNA, 19 nt, Artificial Sequence
  synthetic
aacauuauuggugcgaugc

SEQ ID NO: 4113 - RNA, 19 nt, Artificial Sequence
  synthetic
gaacauuauuggugcgaug

SEQ ID NO: 4114 - RNA, 19 nt, Artificial Sequence
  synthetic
agaacauuauuggugcgau

SEQ ID NO: 4115 - RNA, 19 nt, Artificial Sequence
  synthetic
gagaacauuauuggugcga

SEQ ID NO: 4116 - RNA, 19 nt, Artificial Sequence
  synthetic
ugagaacauuauuggugcg

SEQ ID NO: 4117 - RNA, 19 nt, Artificial Sequence
  synthetic
uugagaacauuauuggugc

SEQ ID NO: 4118 - RNA, 19 nt, Artificial Sequence
  synthetic
uuugagaacauuauuggug

SEQ ID NO: 4119 - RNA, 19 nt, Artificial Sequence
  synthetic
guuugagaacauuauuggu

SEQ ID NO: 4120 - RNA, 19 nt, Artificial Sequence
  synthetic
uguuugagaacauuauugg

SEQ ID NO: 4121 - RNA, 19 nt, Artificial Sequence
  synthetic
uuguuugagaacauuauug

SEQ ID NO: 4122 - RNA, 19 nt, Artificial Sequence
  synthetic
uuuguuugagaacauuauu

SEQ ID NO: 4123 - RNA, 19 nt, Artificial Sequence
  synthetic
uuuuguuugagaacauuau

SEQ ID NO: 4124 - RNA, 19 nt, Artificial Sequence
  synthetic
auuuuguuugagaacauua

SEQ ID NO: 4125 - RNA, 19 nt, Artificial Sequence
  synthetic
cauuuuguuugagaacauu

SEQ ID NO: 4126 - RNA, 19 nt, Artificial Sequence
  synthetic
ccauuuuguuugagaacau

SEQ ID NO: 4127 - RNA, 19 nt, Artificial Sequence
  synthetic
gccauuuuguuugagaaca

SEQ ID NO: 4128 - RNA, 19 nt, Artificial Sequence
  synthetic
ugccauuuuguuugagaac

SEQ ID NO: 4129 - RNA, 19 nt, Artificial Sequence
  synthetic
uugccauuuuguuugagaa

SEQ ID NO: 4130 - RNA, 19 nt, Artificial Sequence
  synthetic
cuugccauuuuguuugaga

SEQ ID NO: 4131 - RNA, 19 nt, Artificial Sequence
  synthetic
ucuugccauuuuguuugag

SEQ ID NO: 4132 - RNA, 19 nt, Artificial Sequence
  synthetic
gucuugccauuuuguuuga

SEQ ID NO: 4133 - RNA, 19 nt, Artificial Sequence
  synthetic
agucuugccauuuuguuug

SEQ ID NO: 4134 - RNA, 19 nt, Artificial Sequence
  synthetic
uagucuugccauuuuguuu

SEQ ID NO: 4135 - RNA, 19 nt, Artificial Sequence
  synthetic
cuagucuugccauuuuguu

SEQ ID NO: 4136 - RNA, 19 nt, Artificial Sequence
  synthetic
ccuagucuugccauuuugu

SEQ ID NO: 4137 - RNA, 19 nt, Artificial Sequence
  synthetic
uccuagucuugccauuuug

SEQ ID NO: 4138 - RNA, 19 nt, Artificial Sequence
  synthetic
uuccuagucuugccauuuu

SEQ ID NO: 4139 - RNA, 19 nt, Artificial Sequence
  synthetic
uuuccuagucuugccauuu

SEQ ID NO: 4140 - RNA, 19 nt, Artificial Sequence
  synthetic
uuuuccuagucuugccauu

SEQ ID NO: 4141 - RNA, 19 nt, Artificial Sequence
  synthetic
cuuuuccuagucuugccau

SEQ ID NO: 4142 - RNA, 19 nt, Artificial Sequence
  synthetic
ccuuuuccuagucuugcca

SEQ ID NO: 4143 - RNA, 19 nt, Artificial Sequence
  synthetic
uccuuuuccuagucuugcc

SEQ ID NO: 4144 - RNA, 19 nt, Artificial Sequence
  synthetic
auccuuuuccuagucuugc

SEQ ID NO: 4145 - RNA, 19 nt, Artificial Sequence
  synthetic
uauccuuuuccuagucuug

SEQ ID NO: 4146 - RNA, 19 nt, Artificial Sequence
  synthetic
guauccuuuuccuagucuu

SEQ ID NO: 4147 - RNA, 19 nt, Artificial Sequence
  synthetic
uguauccuuuuccuagucu

SEQ ID NO: 4148 - RNA, 19 nt, Artificial Sequence
  synthetic
auguauccuuuuccuaguc

SEQ ID NO: 4149 - RNA, 19 nt, Artificial Sequence
  synthetic
cauguauccuuuuccuagu

SEQ ID NO: 4150 - RNA, 19 nt, Artificial Sequence
  synthetic
acauguauccuuuuccuag

SEQ ID NO: 4151 - RNA, 19 nt, Artificial Sequence
  synthetic
aacauguauccuuuuccua

SEQ ID NO: 4152 - RNA, 19 nt, Artificial Sequence
  synthetic
gaacauguauccuuuuccu

SEQ ID NO: 4153 - RNA, 19 nt, Artificial Sequence
  synthetic
cgaacauguauccuuuucc

SEQ ID NO: 4154 - RNA, 19 nt, Artificial Sequence
  synthetic
ucgaacauguauccuuuuc

SEQ ID NO: 4155 - RNA, 19 nt, Artificial Sequence
  synthetic
cucgaacauguauccuuuu

SEQ ID NO: 4156 - RNA, 19 nt, Artificial Sequence
  synthetic
ucucgaacauguauccuuu

SEQ ID NO: 4157 - RNA, 19 nt, Artificial Sequence
  synthetic
cucucgaacauguauccuu

SEQ ID NO: 4158 - RNA, 19 nt, Artificial Sequence
  synthetic
acucucgaacauguauccu

SEQ ID NO: 4159 - RNA, 19 nt, Artificial Sequence
  synthetic
uacucucgaacauguaucc

SEQ ID NO: 4160 - RNA, 19 nt, Artificial Sequence
  synthetic
uuacucucgaacauguauc

SEQ ID NO: 4161 - RNA, 19 nt, Artificial Sequence
  synthetic
cuuacucucgaacauguau

SEQ ID NO: 4162 - RNA, 19 nt, Artificial Sequence
  synthetic
ucuuacucucgaacaugua

SEQ ID NO: 4163 - RNA, 19 nt, Artificial Sequence
  synthetic
cucuuacucucgaacaugu

SEQ ID NO: 4164 - RNA, 19 nt, Artificial Sequence
  synthetic
ucucuuacucucgaacaug

SEQ ID NO: 4165 - RNA, 19 nt, Artificial Sequence
  synthetic
uucucuuacucucgaacau

SEQ ID NO: 4166 - RNA, 19 nt, Artificial Sequence
  synthetic
auucucuuacucucgaaca

SEQ ID NO: 4167 - RNA, 19 nt, Artificial Sequence
  synthetic
cauucucuuacucucgaac

SEQ ID NO: 4168 - RNA, 19 nt, Artificial Sequence
  synthetic
ucauucucuuacucucgaa

SEQ ID NO: 4169 - RNA, 19 nt, Artificial Sequence
  synthetic
uucauucucuuacucucga

SEQ ID NO: 4170 - RNA, 19 nt, Artificial Sequence
  synthetic
guguucggagcuucauucu

SEQ ID NO: 4171 - RNA, 19 nt, Artificial Sequence
  synthetic
cggguauuuguguucggag

SEQ ID NO: 4172 - RNA, 19 nt, Artificial Sequence
  synthetic
gcggguauuuguguucgga

SEQ ID NO: 4173 - RNA, 19 nt, Artificial Sequence
  synthetic
ugcggguauuuguguucgg

SEQ ID NO: 4174 - RNA, 19 nt, Artificial Sequence
  synthetic
cugcggguauuuguguucg

SEQ ID NO: 4175 - RNA, 19 nt, Artificial Sequence
  synthetic
ucugcggguauuuguguuc

SEQ ID NO: 4176 - RNA, 19 nt, Artificial Sequence
  synthetic
uucugcggguauuuguguu

SEQ ID NO: 4177 - RNA, 19 nt, Artificial Sequence
  synthetic
uuucugcggguauuugugu

SEQ ID NO: 4178 - RNA, 19 nt, Artificial Sequence
  synthetic
auuucugcggguauuugug

SEQ ID NO: 4179 - RNA, 19 nt, Artificial Sequence
  synthetic
cauuucugcggguauuugu

SEQ ID NO: 4180 - RNA, 19 nt, Artificial Sequence
  synthetic
gcauuucugcggguauuug

SEQ ID NO: 4181 - RNA, 19 nt, Artificial Sequence
  synthetic
agcauuucugcggguauuu

SEQ ID NO: 4182 - RNA, 19 nt, Artificial Sequence
  synthetic
uagcauuucugcggguauu

SEQ ID NO: 4183 - RNA, 19 nt, Artificial Sequence
  synthetic
cuagcauuucugcggguau

SEQ ID NO: 4184 - RNA, 19 nt, Artificial Sequence
  synthetic
gcuagcauuucugcgggua

SEQ ID NO: 4185 - RNA, 19 nt, Artificial Sequence
  synthetic
ugcuagcauuucugcgggu

SEQ ID NO: 4186 - RNA, 19 nt, Artificial Sequence
  synthetic
uugcuagcauuucugcggg

SEQ ID NO: 4187 - RNA, 19 nt, Artificial Sequence
  synthetic
cuugcuagcauuucugcgg

SEQ ID NO: 4188 - RNA, 19 nt, Artificial Sequence
  synthetic
gcuugcuagcauuucugcg

SEQ ID NO: 4189 - RNA, 19 nt, Artificial Sequence
  synthetic
ugcuugcuagcauuucugc

SEQ ID NO: 4190 - RNA, 19 nt, Artificial Sequence
  synthetic
augcuugcuagcauuucug

SEQ ID NO: 4191 - RNA, 19 nt, Artificial Sequence
  synthetic
ucaggucgaugcuugcuag

SEQ ID NO: 4192 - RNA, 19 nt, Artificial Sequence
  synthetic
uugauucauugaaauacuu

SEQ ID NO: 4193 - RNA, 19 nt, Artificial Sequence
  synthetic
uuuucuuccuuguugauuc

SEQ ID NO: 4194 - RNA, 19 nt, Artificial Sequence
  synthetic
auuuucuuccuuguugauu

SEQ ID NO: 4195 - RNA, 19 nt, Artificial Sequence
  synthetic
aauuuucuuccuuguugau

SEQ ID NO: 4196 - RNA, 19 nt, Artificial Sequence
  synthetic
caauuuucuuccuuguuga

SEQ ID NO: 4197 - RNA, 19 nt, Artificial Sequence
  synthetic
ucaauuuucuuccuuguug

SEQ ID NO: 4198 - RNA, 19 nt, Artificial Sequence
  synthetic
cucaauuuucuuccuuguu

SEQ ID NO: 4199 - RNA, 19 nt, Artificial Sequence
  synthetic
ucucaauuuucuuccuugu

SEQ ID NO: 4200 - RNA, 19 nt, Artificial Sequence
  synthetic
uuauuuucucaauuuucuu

SEQ ID NO: 4201 - RNA, 19 nt, Artificial Sequence
  synthetic
cuuauuuucucaauuuucu

SEQ ID NO: 4202 - RNA, 19 nt, Artificial Sequence
  synthetic
ccuuauuuucucaauuuuc

SEQ ID NO: 4203 - RNA, 19 nt, Artificial Sequence
  synthetic
gccuuauuuucucaauuuu

SEQ ID NO: 4204 - RNA, 19 nt, Artificial Sequence
  synthetic
ggccuuauuuucucaauuu

SEQ ID NO: 4205 - RNA, 19 nt, Artificial Sequence
  synthetic
aggccuuauuuucucaauu

SEQ ID NO: 4206 - RNA, 19 nt, Artificial Sequence
  synthetic
gaggccuuauuuucucaau

SEQ ID NO: 4207 - RNA, 19 nt, Artificial Sequence
  synthetic
agaggccuuauuuucucaa

SEQ ID NO: 4208 - RNA, 19 nt, Artificial Sequence
  synthetic
aagaggccuuauuuucuca

SEQ ID NO: 4209 - RNA, 19 nt, Artificial Sequence
  synthetic
gaagaggccuuauuuucuc

SEQ ID NO: 4210 - RNA, 19 nt, Artificial Sequence
  synthetic
agaagaggccuuauuuucu

SEQ ID NO: 4211 - RNA, 19 nt, Artificial Sequence
  synthetic
uagaagaggccuuauuuuc

SEQ ID NO: 4212 - RNA, 19 nt, Artificial Sequence
  synthetic
uuagaagaggccuuauuuu

SEQ ID NO: 4213 - RNA, 19 nt, Artificial Sequence
  synthetic
auuagaagaggccuuauuu

SEQ ID NO: 4214 - RNA, 19 nt, Artificial Sequence
  synthetic
uauuagaagaggccuuauu

SEQ ID NO: 4215 - RNA, 19 nt, Artificial Sequence
  synthetic
cuauuagaagaggccuuau

SEQ ID NO: 4216 - RNA, 19 nt, Artificial Sequence
  synthetic
ucuauuagaagaggccuua

SEQ ID NO: 4217 - RNA, 19 nt, Artificial Sequence
  synthetic
augaugcugugccaucuau

SEQ ID NO: 4218 - RNA, 19 nt, Artificial Sequence
  synthetic
ggcucaaugaugcugugcc

SEQ ID NO: 4219 - RNA, 19 nt, Artificial Sequence
  synthetic
gggcucaaugaugcugugc

SEQ ID NO: 4220 - RNA, 19 nt, Artificial Sequence
  synthetic
agggcucaaugaugcugug

SEQ ID NO: 4221 - RNA, 19 nt, Artificial Sequence
  synthetic
cagggcucaaugaugcugu

SEQ ID NO: 4222 - RNA, 19 nt, Artificial Sequence
  synthetic
ccagggcucaaugaugcug

SEQ ID NO: 4223 - RNA, 19 nt, Artificial Sequence
  synthetic
cccagggcucaaugaugcu

SEQ ID NO: 4224 - RNA, 19 nt, Artificial Sequence
  synthetic
ucccagggcucaaugaugc

SEQ ID NO: 4225 - RNA, 19 nt, Artificial Sequence
  synthetic
aucccagggcucaaugaug

SEQ ID NO: 4226 - RNA, 19 nt, Artificial Sequence
  synthetic
caucccagggcucaaugau

SEQ ID NO: 4227 - RNA, 19 nt, Artificial Sequence
  synthetic
ucaucccagggcucaauga

SEQ ID NO: 4228 - RNA, 19 nt, Artificial Sequence
  synthetic
aucaucccagggcucaaug

SEQ ID NO: 4229 - RNA, 19 nt, Artificial Sequence
  synthetic
caucaucccagggcucaau

SEQ ID NO: 4230 - RNA, 19 nt, Artificial Sequence
  synthetic
ucaucaucccagggcucaa

SEQ ID NO: 4231 - RNA, 19 nt, Artificial Sequence
  synthetic
aucaucaucccagggcuca

SEQ ID NO: 4232 - RNA, 19 nt, Artificial Sequence
  synthetic
caucaucaucccagggcuc

SEQ ID NO: 4233 - RNA, 19 nt, Artificial Sequence
  synthetic
ccaucaucaucccagggcu

SEQ ID NO: 4234 - RNA, 19 nt, Artificial Sequence
  synthetic
cccaucaucaucccagggc

SEQ ID NO: 4235 - RNA, 19 nt, Artificial Sequence
  synthetic
gcccaucaucaucccaggg

SEQ ID NO: 4236 - RNA, 19 nt, Artificial Sequence
  synthetic
ugcccaucaucaucccagg

SEQ ID NO: 4237 - RNA, 19 nt, Artificial Sequence
  synthetic
augcccaucaucaucccag

SEQ ID NO: 4238 - RNA, 19 nt, Artificial Sequence
  synthetic
caugcccaucaucauccca

SEQ ID NO: 4239 - RNA, 19 nt, Artificial Sequence
  synthetic
acaugcccaucaucauccc

SEQ ID NO: 4240 - RNA, 19 nt, Artificial Sequence
  synthetic
aacaugcccaucaucaucc

SEQ ID NO: 4241 - RNA, 19 nt, Artificial Sequence
  synthetic
gaacaugcccaucaucauc

SEQ ID NO: 4242 - RNA, 19 nt, Artificial Sequence
  synthetic
ugaacaugcccaucaucau

SEQ ID NO: 4243 - RNA, 19 nt, Artificial Sequence
  synthetic
uugaacaugcccaucauca

SEQ ID NO: 4244 - RNA, 19 nt, Artificial Sequence
  synthetic
guugaacaugcccaucauc

SEQ ID NO: 4245 - RNA, 19 nt, Artificial Sequence
  synthetic
uguugaacaugcccaucau

SEQ ID NO: 4246 - RNA, 19 nt, Artificial Sequence
  synthetic
auguugaacaugcccauca

SEQ ID NO: 4247 - RNA, 19 nt, Artificial Sequence
  synthetic
cauguugaacaugcccauc

SEQ ID NO: 4248 - RNA, 19 nt, Artificial Sequence
  synthetic
gcauguugaacaugcccau

SEQ ID NO: 4249 - RNA, 19 nt, Artificial Sequence
  synthetic
agcauguugaacaugccca

SEQ ID NO: 4250 - RNA, 19 nt, Artificial Sequence
  synthetic
uagcauguugaacaugccc

SEQ ID NO: 4251 - RNA, 19 nt, Artificial Sequence
  synthetic
uuagcauguugaacaugcc

SEQ ID NO: 4252 - RNA, 19 nt, Artificial Sequence
  synthetic
cuuagcauguugaacaugc

SEQ ID NO: 4253 - RNA, 19 nt, Artificial Sequence
  synthetic
acuuagcauguugaacaug

SEQ ID NO: 4254 - RNA, 19 nt, Artificial Sequence
  synthetic
uacuuagcauguugaacau

SEQ ID NO: 4255 - RNA, 19 nt, Artificial Sequence
  synthetic
guacuuagcauguugaaca

SEQ ID NO: 4256 - RNA, 19 nt, Artificial Sequence
  synthetic
cguacuuagcauguugaac

SEQ ID NO: 4257 - RNA, 19 nt, Artificial Sequence
  synthetic
ccguacuuagcauguugaa

SEQ ID NO: 4258 - RNA, 19 nt, Artificial Sequence
  synthetic
accguacuuagcauguuga

SEQ ID NO: 4259 - RNA, 19 nt, Artificial Sequence
  synthetic
aaccguacuuagcauguug

SEQ ID NO: 4260 - RNA, 19 nt, Artificial Sequence
  synthetic
aaaccguacuuagcauguu

SEQ ID NO: 4261 - RNA, 19 nt, Artificial Sequence
  synthetic
aaaaccguacuuagcaugu

SEQ ID NO: 4262 - RNA, 19 nt, Artificial Sequence
  synthetic
uaaaaccguacuuagcaug

SEQ ID NO: 4263 - RNA, 19 nt, Artificial Sequence
  synthetic
cuaaaaccguacuuagcau

SEQ ID NO: 4264 - RNA, 19 nt, Artificial Sequence
  synthetic
ccuaaaaccguacuuagca

SEQ ID NO: 4265 - RNA, 19 nt, Artificial Sequence
  synthetic
uccuaaaaccguacuuagc

SEQ ID NO: 4266 - RNA, 19 nt, Artificial Sequence
  synthetic
cuccuaaaaccguacuuag

SEQ ID NO: 4267 - RNA, 19 nt, Artificial Sequence
  synthetic
acuccuaaaaccguacuua

SEQ ID NO: 4268 - RNA, 19 nt, Artificial Sequence
  synthetic
gacuccuaaaaccguacuu

SEQ ID NO: 4269 - RNA, 19 nt, Artificial Sequence
  synthetic
agacuccuaaaaccguacu

SEQ ID NO: 4270 - RNA, 19 nt, Artificial Sequence
  synthetic
gagacuccuaaaaccguac

SEQ ID NO: 4271 - RNA, 19 nt, Artificial Sequence
  synthetic
guaucgagacuccuaaaac

SEQ ID NO: 4272 - RNA, 19 nt, Artificial Sequence
  synthetic
aguaucgagacuccuaaaa

SEQ ID NO: 4273 - RNA, 19 nt, Artificial Sequence
  synthetic
caguaucgagacuccuaaa

SEQ ID NO: 4274 - RNA, 19 nt, Artificial Sequence
  synthetic
ucaguaucgagacuccuaa

SEQ ID NO: 4275 - RNA, 19 nt, Artificial Sequence
  synthetic
uucaguaucgagacuccua

SEQ ID NO: 4276 - RNA, 19 nt, Artificial Sequence
  synthetic
auucaguaucgagacuccu

SEQ ID NO: 4277 - RNA, 19 nt, Artificial Sequence
  synthetic
gauucaguaucgagacucc

SEQ ID NO: 4278 - RNA, 19 nt, Artificial Sequence
  synthetic
agauucaguaucgagacuc

SEQ ID NO: 4279 - RNA, 19 nt, Artificial Sequence
  synthetic
aagauucaguaucgagacu

SEQ ID NO: 4280 - RNA, 19 nt, Artificial Sequence
  synthetic
caagauucaguaucgagac

SEQ ID NO: 4281 - RNA, 19 nt, Artificial Sequence
  synthetic
ccaagauucaguaucgaga

SEQ ID NO: 4282 - RNA, 19 nt, Artificial Sequence
  synthetic
uuugcccaagauucaguau

SEQ ID NO: 4283 - RNA, 19 nt, Artificial Sequence
  synthetic
uuuugcccaagauucagua

SEQ ID NO: 4284 - RNA, 19 nt, Artificial Sequence
  synthetic
cuuuugcccaagauucagu

SEQ ID NO: 4285 - RNA, 19 nt, Artificial Sequence
  synthetic
ucuuuugcccaagauucag

SEQ ID NO: 4286 - RNA, 19 nt, Artificial Sequence
  synthetic
uucuuuugcccaagauuca

SEQ ID NO: 4287 - RNA, 19 nt, Artificial Sequence
  synthetic
uuucuuuugcccaagauuc

SEQ ID NO: 4288 - RNA, 19 nt, Artificial Sequence
  synthetic
auuucuuuugcccaagauu

SEQ ID NO: 4289 - RNA, 19 nt, Artificial Sequence
  synthetic
uauuucuuuugcccaagau

SEQ ID NO: 4290 - RNA, 19 nt, Artificial Sequence
  synthetic
guauuucuuuugcccaaga

SEQ ID NO: 4291 - RNA, 19 nt, Artificial Sequence
  synthetic
uguauuucuuuugcccaag

SEQ ID NO: 4292 - RNA, 19 nt, Artificial Sequence
  synthetic
guguauuucuuuugcccaa

SEQ ID NO: 4293 - RNA, 19 nt, Artificial Sequence
  synthetic
gguguauuucuuuugccca

SEQ ID NO: 4294 - RNA, 19 nt, Artificial Sequence
  synthetic
ugguguauuucuuuugccc

SEQ ID NO: 4295 - RNA, 19 nt, Artificial Sequence
  synthetic
uugguguauuucuuuugcc

SEQ ID NO: 4296 - RNA, 19 nt, Artificial Sequence
  synthetic
cuugguguauuucuuuugc

SEQ ID NO: 4297 - RNA, 19 nt, Artificial Sequence
  synthetic
ucuugguguauuucuuuug

SEQ ID NO: 4298 - RNA, 19 nt, Artificial Sequence
  synthetic
gucuugguguauuucuuuu

SEQ ID NO: 4299 - RNA, 19 nt, Artificial Sequence
  synthetic
ugucuugguguauuucuuu

SEQ ID NO: 4300 - RNA, 19 nt, Artificial Sequence
  synthetic
uugucuugguguauuucuu

SEQ ID NO: 4301 - RNA, 19 nt, Artificial Sequence
  synthetic
guugucuugguguauuucu

SEQ ID NO: 4302 - RNA, 19 nt, Artificial Sequence
  synthetic
uguugucuugguguauuuc

SEQ ID NO: 4303 - RNA, 19 nt, Artificial Sequence
  synthetic
auguugucuugguguauuu

SEQ ID NO: 4304 - RNA, 19 nt, Artificial Sequence
  synthetic
uauguugucuugguguauu

SEQ ID NO: 4305 - RNA, 19 nt, Artificial Sequence
  synthetic
cccaccaguauguugucuu

SEQ ID NO: 4306 - RNA, 19 nt, Artificial Sequence
  synthetic
auuggagcccaucccacca

SEQ ID NO: 4307 - RNA, 19 nt, Artificial Sequence
  synthetic
gauuggagcccaucccacc

SEQ ID NO: 4308 - RNA, 19 nt, Artificial Sequence
  synthetic
ggauuggagcccaucccac

SEQ ID NO: 4309 - RNA, 19 nt, Artificial Sequence
  synthetic
aggauuggagcccauccca

SEQ ID NO: 4310 - RNA, 19 nt, Artificial Sequence
  synthetic
gaggauuggagcccauccc

SEQ ID NO: 4311 - RNA, 19 nt, Artificial Sequence
  synthetic
ggaggauuggagcccaucc

SEQ ID NO: 4312 - RNA, 19 nt, Artificial Sequence
  synthetic
cggaggauuggagcccauc

SEQ ID NO: 4313 - RNA, 19 nt, Artificial Sequence
  synthetic
ucggaggauuggagcccau

SEQ ID NO: 4314 - RNA, 19 nt, Artificial Sequence
  synthetic
cuaugagggcaaaaucguc

SEQ ID NO: 4315 - RNA, 19 nt, Artificial Sequence
  synthetic
ucacuaugagggcaaaauc

SEQ ID NO: 4316 - RNA, 19 nt, Artificial Sequence
  synthetic
uucacuaugagggcaaaau

SEQ ID NO: 4317 - RNA, 19 nt, Artificial Sequence
  synthetic
auucacuaugagggcaaaa

SEQ ID NO: 4318 - RNA, 19 nt, Artificial Sequence
  synthetic
cauucacuaugagggcaaa

SEQ ID NO: 4319 - RNA, 19 nt, Artificial Sequence
  synthetic
gcauucacuaugagggcaa

SEQ ID NO: 4320 - RNA, 19 nt, Artificial Sequence
  synthetic
ugcauucacuaugagggca

SEQ ID NO: 4321 - RNA, 19 nt, Artificial Sequence
  synthetic
gugcauucacuaugagggc

SEQ ID NO: 4322 - RNA, 19 nt, Artificial Sequence
  synthetic
ggugcauucacuaugaggg

SEQ ID NO: 4323 - RNA, 19 nt, Artificial Sequence
  synthetic
uggugcauucacuaugagg

SEQ ID NO: 4324 - RNA, 19 nt, Artificial Sequence
  synthetic
uuggugcauucacuaugag

SEQ ID NO: 4325 - RNA, 19 nt, Artificial Sequence
  synthetic
uuuggugcauucacuauga

SEQ ID NO: 4326 - RNA, 19 nt, Artificial Sequence
  synthetic
auuuggugcauucacuaug

SEQ ID NO: 4327 - RNA, 19 nt, Artificial Sequence
  synthetic
gauuuggugcauucacuau

SEQ ID NO: 4328 - RNA, 19 nt, Artificial Sequence
  synthetic
ugauuuggugcauucacua

SEQ ID NO: 4329 - RNA, 19 nt, Artificial Sequence
  synthetic
augauuuggugcauucacu

SEQ ID NO: 4330 - RNA, 19 nt, Artificial Sequence
  synthetic
caugauuuggugcauucac

SEQ ID NO: 4331 - RNA, 19 nt, Artificial Sequence
  synthetic
ucaugauuuggugcauuca

SEQ ID NO: 4332 - RNA, 19 nt, Artificial Sequence
  synthetic
cucaugauuuggugcauuc

SEQ ID NO: 4333 - RNA, 19 nt, Artificial Sequence
  synthetic
ccucaugauuuggugcauu

SEQ ID NO: 4334 - RNA, 19 nt, Artificial Sequence
  synthetic
cccucaugauuuggugcau

SEQ ID NO: 4335 - RNA, 19 nt, Artificial Sequence
  synthetic
ucccucaugauuuggugca

SEQ ID NO: 4336 - RNA, 19 nt, Artificial Sequence
  synthetic
uucccucaugauuuggugc

SEQ ID NO: 4337 - RNA, 19 nt, Artificial Sequence
  synthetic
auucccucaugauuuggug

SEQ ID NO: 4338 - RNA, 19 nt, Artificial Sequence
  synthetic
uauucccucaugauuuggu

SEQ ID NO: 4339 - RNA, 19 nt, Artificial Sequence
  synthetic
guauucccucaugauuugg

SEQ ID NO: 4340 - RNA, 19 nt, Artificial Sequence
  synthetic
uguauucccucaugauuug

SEQ ID NO: 4341 - RNA, 19 nt, Artificial Sequence
  synthetic
uuguauucccucaugauuu

SEQ ID NO: 4342 - RNA, 19 nt, Artificial Sequence
  synthetic
cuuguauucccucaugauu

SEQ ID NO: 4343 - RNA, 19 nt, Artificial Sequence
  synthetic
gcuuguauucccucaugau

SEQ ID NO: 4344 - RNA, 19 nt, Artificial Sequence
  synthetic
ugcuuguauucccucauga

SEQ ID NO: 4345 - RNA, 19 nt, Artificial Sequence
  synthetic
cugcuuguauucccucaug

SEQ ID NO: 4346 - RNA, 19 nt, Artificial Sequence
  synthetic
ccugcuuguauucccucau

SEQ ID NO: 4347 - RNA, 19 nt, Artificial Sequence
  synthetic
uccugcuuguauucccuca

SEQ ID NO: 4348 - RNA, 19 nt, Artificial Sequence
  synthetic
cuccugcuuguauucccuc

SEQ ID NO: 4349 - RNA, 19 nt, Artificial Sequence
  synthetic
acuccugcuuguauucccu

SEQ ID NO: 4350 - RNA, 19 nt, Artificial Sequence
  synthetic
cacuccugcuuguauuccc

SEQ ID NO: 4351 - RNA, 19 nt, Artificial Sequence
  synthetic
ccacuccugcuuguauucc

SEQ ID NO: 4352 - RNA, 19 nt, Artificial Sequence
  synthetic
uccacuccugcuuguauuc

SEQ ID NO: 4353 - RNA, 19 nt, Artificial Sequence
  synthetic
auccacuccugcuuguauu

SEQ ID NO: 4354 - RNA, 19 nt, Artificial Sequence
  synthetic
uauccacuccugcuuguau

SEQ ID NO: 4355 - RNA, 19 nt, Artificial Sequence
  synthetic
cuauccacuccugcuugua

SEQ ID NO: 4356 - RNA, 19 nt, Artificial Sequence
  synthetic
ucuauccacuccugcuugu

SEQ ID NO: 4357 - RNA, 19 nt, Artificial Sequence
  synthetic
aucuauccacuccugcuug

SEQ ID NO: 4358 - RNA, 19 nt, Artificial Sequence
  synthetic
aaucuauccacuccugcuu

SEQ ID NO: 4359 - RNA, 19 nt, Artificial Sequence
  synthetic
gaaucuauccacuccugcu

SEQ ID NO: 4360 - RNA, 19 nt, Artificial Sequence
  synthetic
agaaucuauccacuccugc

SEQ ID NO: 4361 - RNA, 19 nt, Artificial Sequence
  synthetic
uagaaucuauccacuccug

SEQ ID NO: 4362 - RNA, 19 nt, Artificial Sequence
  synthetic
guagaaucuauccacuccu

SEQ ID NO: 4363 - RNA, 19 nt, Artificial Sequence
  synthetic
uguagaaucuauccacucc

SEQ ID NO: 4364 - RNA, 19 nt, Artificial Sequence
  synthetic
cuguagaaucuauccacuc

SEQ ID NO: 4365 - RNA, 19 nt, Artificial Sequence
  synthetic
ccuguagaaucuauccacu

SEQ ID NO: 4366 - RNA, 19 nt, Artificial Sequence
  synthetic
uccuguagaaucuauccac

SEQ ID NO: 4367 - RNA, 19 nt, Artificial Sequence
  synthetic
uucccaccaacuugcaggu

SEQ ID NO: 4368 - RNA, 19 nt, Artificial Sequence
  synthetic
ugcucauguugauucccac

SEQ ID NO: 4369 - RNA, 19 nt, Artificial Sequence
  synthetic
uugcucauguugauuccca

SEQ ID NO: 4370 - RNA, 19 nt, Artificial Sequence
  synthetic
uuugcucauguugauuccc

SEQ ID NO: 4371 - RNA, 19 nt, Artificial Sequence
  synthetic
uuuugcucauguugauucc

SEQ ID NO: 4372 - RNA, 19 nt, Artificial Sequence
  synthetic
uuuuugcucauguugauuc

SEQ ID NO: 4373 - RNA, 19 nt, Artificial Sequence
  synthetic
cuuuuugcucauguugauu

SEQ ID NO: 4374 - RNA, 19 nt, Artificial Sequence
  synthetic
ucuuuuugcucauguugau

SEQ ID NO: 4375 - RNA, 19 nt, Artificial Sequence
  synthetic
uucuuuuugcucauguuga

SEQ ID NO: 4376 - RNA, 19 nt, Artificial Sequence
  synthetic
cuucuuuuugcucauguug

SEQ ID NO: 4377 - RNA, 19 nt, Artificial Sequence
  synthetic
acuucuuuuugcucauguu

SEQ ID NO: 4378 - RNA, 19 nt, Artificial Sequence
  synthetic
gacuucuuuuugcucaugu

SEQ ID NO: 4379 - RNA, 19 nt, Artificial Sequence
  synthetic
ggacuucuuuuugcucaug

SEQ ID NO: 4380 - RNA, 19 nt, Artificial Sequence
  synthetic
aggacuucuuuuugcucau

SEQ ID NO: 4381 - RNA, 19 nt, Artificial Sequence
  synthetic
uaggacuucuuuuugcuca

SEQ ID NO: 4382 - RNA, 19 nt, Artificial Sequence
  synthetic
auaggacuucuuuuugcuc

SEQ ID NO: 4383 - RNA, 19 nt, Artificial Sequence
  synthetic
uauaggacuucuuuuugcu

SEQ ID NO: 4384 - RNA, 19 nt, Artificial Sequence
  synthetic
auauaggacuucuuuuugc

SEQ ID NO: 4385 - RNA, 19 nt, Artificial Sequence
  synthetic
uauauaggacuucuuuuug

SEQ ID NO: 4386 - RNA, 19 nt, Artificial Sequence
  synthetic
uuauauaggacuucuuuuu

SEQ ID NO: 4387 - RNA, 19 nt, Artificial Sequence
  synthetic
uuuauauaggacuucuuuu

SEQ ID NO: 4388 - RNA, 19 nt, Artificial Sequence
  synthetic
auuuauauaggacuucuuu

SEQ ID NO: 4389 - RNA, 19 nt, Artificial Sequence
  synthetic
uauuuauauaggacuucuu

SEQ ID NO: 4390 - RNA, 19 nt, Artificial Sequence
  synthetic
uuauuuauauaggacuucu

SEQ ID NO: 4391 - RNA, 19 nt, Artificial Sequence
  synthetic
uuuauuuauauaggacuuc

SEQ ID NO: 4392 - RNA, 19 nt, Artificial Sequence
  synthetic
uuuuauuuauauaggacuu

SEQ ID NO: 4393 - RNA, 19 nt, Artificial Sequence
  synthetic
guuuuauuuauauaggacu

SEQ ID NO: 4394 - RNA, 19 nt, Artificial Sequence
  synthetic
uguuuuauuuauauaggac

SEQ ID NO: 4395 - RNA, 19 nt, Artificial Sequence
  synthetic
cuguuuuauuuauauagga

SEQ ID NO: 4396 - RNA, 19 nt, Artificial Sequence
  synthetic
ccuguuuuauuuauauagg

SEQ ID NO: 4397 - RNA, 19 nt, Artificial Sequence
  synthetic
ugaauucaaauguuccugu

SEQ ID NO: 4398 - RNA, 19 nt, Artificial Sequence
  synthetic
agcuugugaauucaaaugu

SEQ ID NO: 4399 - RNA, 19 nt, Artificial Sequence
  synthetic
aagcuugugaauucaaaug

SEQ ID NO: 4400 - RNA, 19 nt, Artificial Sequence
  synthetic
aaagcuugugaauucaaau

SEQ ID NO: 4401 - RNA, 19 nt, Artificial Sequence
  synthetic
aaaagcuugugaauucaaa

SEQ ID NO: 4402 - RNA, 19 nt, Artificial Sequence
  synthetic
aaaaagcuugugaauucaa

SEQ ID NO: 4403 - RNA, 19 nt, Artificial Sequence
  synthetic
aaaaaagcuugugaauuca

SEQ ID NO: 4404 - RNA, 19 nt, Artificial Sequence
  synthetic
aaaaaaagcuugugaauuc

SEQ ID NO: 4405 - RNA, 19 nt, Artificial Sequence
  synthetic
uaaaaaaagcuugugaauu

SEQ ID NO: 4406 - RNA, 19 nt, Artificial Sequence
  synthetic
auaaaaaaagcuugugaau

SEQ ID NO: 4407 - RNA, 19 nt, Artificial Sequence
  synthetic
gauaaaaaaagcuugugaa

SEQ ID NO: 4408 - RNA, 19 nt, Artificial Sequence
  synthetic
cgauaaaaaaagcuuguga

SEQ ID NO: 4409 - RNA, 19 nt, Artificial Sequence
  synthetic
agcgauaaaaaaagcuugu

SEQ ID NO: 4410 - RNA, 19 nt, Artificial Sequence
  synthetic
aauuagccacaaauccaua

SEQ ID NO: 4411 - RNA, 19 nt, Artificial Sequence
  synthetic
aaauuagccacaaauccau

SEQ ID NO: 4412 - RNA, 19 nt, Artificial Sequence
  synthetic
aaaauuagccacaaaucca

SEQ ID NO: 4413 - RNA, 19 nt, Artificial Sequence
  synthetic
uaaaauuagccacaaaucc

SEQ ID NO: 4414 - RNA, 19 nt, Artificial Sequence
  synthetic
cuaaaauuagccacaaauc

SEQ ID NO: 4415 - RNA, 19 nt, Artificial Sequence
  synthetic
gcuaaaauuagccacaaau

SEQ ID NO: 4416 - RNA, 19 nt, Artificial Sequence
  synthetic
ugcuaaaauuagccacaaa

SEQ ID NO: 4417 - RNA, 19 nt, Artificial Sequence
  synthetic
augcuaaaauuagccacaa

SEQ ID NO: 4418 - RNA, 19 nt, Artificial Sequence
  synthetic
caugcuaaaauuagccaca

SEQ ID NO: 4419 - RNA, 19 nt, Artificial Sequence
  synthetic
ccaugcuaaaauuagccac

SEQ ID NO: 4420 - RNA, 19 nt, Artificial Sequence
  synthetic
uccaugcuaaaauuagcca

SEQ ID NO: 4421 - RNA, 19 nt, Artificial Sequence
  synthetic
cuccaugcuaaaauuagcc

SEQ ID NO: 4422 - RNA, 19 nt, Artificial Sequence
  synthetic
gcuccaugcuaaaauuagc

SEQ ID NO: 4423 - RNA, 19 nt, Artificial Sequence
  synthetic
agcuccaugcuaaaauuag

SEQ ID NO: 4424 - RNA, 19 nt, Artificial Sequence
  synthetic
ugggcagcuccaugcuaaa

SEQ ID NO: 4425 - RNA, 19 nt, Artificial Sequence
  synthetic
cagacacuccaaaacuggg

SEQ ID NO: 4426 - RNA, 19 nt, Artificial Sequence
  synthetic
ccagacacuccaaaacugg

SEQ ID NO: 4427 - RNA, 19 nt, Artificial Sequence
  synthetic
uccagacacuccaaaacug

SEQ ID NO: 4428 - RNA, 19 nt, Artificial Sequence
  synthetic
uuccagacacuccaaaacu

SEQ ID NO: 4429 - RNA, 19 nt, Artificial Sequence
  synthetic
auuccagacacuccaaaac

SEQ ID NO: 4430 - RNA, 19 nt, Artificial Sequence
  synthetic
uauuccagacacuccaaaa

SEQ ID NO: 4431 - RNA, 19 nt, Artificial Sequence
  synthetic
uuauuccagacacuccaaa

SEQ ID NO: 4432 - RNA, 19 nt, Artificial Sequence
  synthetic
uuuauuccagacacuccaa

SEQ ID NO: 4433 - RNA, 19 nt, Artificial Sequence
  synthetic
uaucagcugacucauuuau

SEQ ID NO: 4434 - RNA, 19 nt, Artificial Sequence
  synthetic
ugcucauaucagcugacuc

SEQ ID NO: 4435 - RNA, 19 nt, Artificial Sequence
  synthetic
augcucauaucagcugacu

SEQ ID NO: 4436 - RNA, 19 nt, Artificial Sequence
  synthetic
aaugcucauaucagcugac

SEQ ID NO: 4437 - RNA, 19 nt, Artificial Sequence
  synthetic
caaugcucauaucagcuga

SEQ ID NO: 4438 - RNA, 19 nt, Artificial Sequence
  synthetic
ccaaugcucauaucagcug

SEQ ID NO: 4439 - RNA, 19 nt, Artificial Sequence
  synthetic
uccaaugcucauaucagcu

SEQ ID NO: 4440 - RNA, 19 nt, Artificial Sequence
  synthetic
cuccaaugcucauaucagc

SEQ ID NO: 4441 - RNA, 19 nt, Artificial Sequence
  synthetic
acuccaaugcucauaucag

SEQ ID NO: 4442 - RNA, 19 nt, Artificial Sequence
  synthetic
uacuccaaugcucauauca

SEQ ID NO: 4443 - RNA, 19 nt, Artificial Sequence
  synthetic
uuacuccaaugcucauauc

SEQ ID NO: 4444 - RNA, 19 nt, Artificial Sequence
  synthetic
guuacuccaaugcucauau

SEQ ID NO: 4445 - RNA, 19 nt, Artificial Sequence
  synthetic
uguuacuccaaugcucaua

SEQ ID NO: 4446 - RNA, 19 nt, Artificial Sequence
  synthetic
cuguuacuccaaugcucau

SEQ ID NO: 4447 - RNA, 19 nt, Artificial Sequence
  synthetic
acuguuacuccaaugcuca

SEQ ID NO: 4448 - RNA, 19 nt, Artificial Sequence
  synthetic
cacuguuacuccaaugcuc

SEQ ID NO: 4449 - RNA, 19 nt, Artificial Sequence
  synthetic
ucacuguuacuccaaugcu

SEQ ID NO: 4450 - RNA, 19 nt, Artificial Sequence
  synthetic
aucacuguuacuccaaugc

SEQ ID NO: 4451 - RNA, 19 nt, Artificial Sequence
  synthetic
uaucacuguuacuccaaug

SEQ ID NO: 4452 - RNA, 19 nt, Artificial Sequence
  synthetic
uuaucacuguuacuccaau

SEQ ID NO: 4453 - RNA, 19 nt, Artificial Sequence
  synthetic
uuuaucacuguuacuccaa

SEQ ID NO: 4454 - RNA, 19 nt, Artificial Sequence
  synthetic
cuuuaucacuguuacucca

SEQ ID NO: 4455 - RNA, 19 nt, Artificial Sequence
  synthetic
ucuuuaucacuguuacucc

SEQ ID NO: 4456 - RNA, 19 nt, Artificial Sequence
  synthetic
uucuuuaucacuguuacuc

SEQ ID NO: 4457 - RNA, 19 nt, Artificial Sequence
  synthetic
guucuuuaucacuguuacu

SEQ ID NO: 4458 - RNA, 19 nt, Artificial Sequence
  synthetic
uguucuuuaucacuguuac

SEQ ID NO: 4459 - RNA, 19 nt, Artificial Sequence
  synthetic
uuguucuuuaucacuguua

SEQ ID NO: 4460 - RNA, 19 nt, Artificial Sequence
  synthetic
guuguucuuuaucacuguu

SEQ ID NO: 4461 - RNA, 19 nt, Artificial Sequence
  synthetic
uguuguucuuuaucacugu

SEQ ID NO: 4462 - RNA, 19 nt, Artificial Sequence
  synthetic
auguuguucuuuaucacug

SEQ ID NO: 4463 - RNA, 19 nt, Artificial Sequence
  synthetic
cauguuguucuuuaucacu

SEQ ID NO: 4464 - RNA, 19 nt, Artificial Sequence
  synthetic
ucauguuguucuuuaucac

SEQ ID NO: 4465 - RNA, 19 nt, Artificial Sequence
  synthetic
aucauguuguucuuuauca

SEQ ID NO: 4466 - RNA, 19 nt, Artificial Sequence
  synthetic
uaucauguuguucuuuauc

SEQ ID NO: 4467 - RNA, 19 nt, Artificial Sequence
  synthetic
uuaucauguuguucuuuau

SEQ ID NO: 4468 - RNA, 19 nt, Artificial Sequence
  synthetic
uuuaucauguuguucuuua

SEQ ID NO: 4469 - RNA, 19 nt, Artificial Sequence
  synthetic
guuuaucauguuguucuuu

SEQ ID NO: 4470 - RNA, 19 nt, Artificial Sequence
  synthetic
uguuuaucauguuguucuu

SEQ ID NO: 4471 - RNA, 19 nt, Artificial Sequence
  synthetic
uuguuuaucauguuguucu

SEQ ID NO: 4472 - RNA, 19 nt, Artificial Sequence
  synthetic
auuguuuaucauguuguuc

SEQ ID NO: 4473 - RNA, 19 nt, Artificial Sequence
  synthetic
cauuguuuaucauguuguu

SEQ ID NO: 4474 - RNA, 19 nt, Artificial Sequence
  synthetic
ucauuguuuaucauguugu

SEQ ID NO: 4475 - RNA, 19 nt, Artificial Sequence
  synthetic
gucauuguuuaucauguug

SEQ ID NO: 4476 - RNA, 19 nt, Artificial Sequence
  synthetic
ggucauuguuuaucauguu

SEQ ID NO: 4477 - RNA, 19 nt, Artificial Sequence
  synthetic
aggucauuguuuaucaugu

SEQ ID NO: 4478 - RNA, 19 nt, Artificial Sequence
  synthetic
aaggucauuguuuaucaug

SEQ ID NO: 4479 - RNA, 19 nt, Artificial Sequence
  synthetic
caaggucauuguuuaucau

SEQ ID NO: 4480 - RNA, 19 nt, Artificial Sequence
  synthetic
ccaaggucauuguuuauca

SEQ ID NO: 4481 - RNA, 19 nt, Artificial Sequence
  synthetic
uccaaggucauuguuuauc

SEQ ID NO: 4482 - RNA, 19 nt, Artificial Sequence
  synthetic
guccaaggucauuguuuau

SEQ ID NO: 4483 - RNA, 19 nt, Artificial Sequence
  synthetic
gguccaaggucauuguuua

SEQ ID NO: 4484 - RNA, 19 nt, Artificial Sequence
  synthetic
ugguccaaggucauuguuu

SEQ ID NO: 4485 - RNA, 19 nt, Artificial Sequence
  synthetic
cugguccaaggucauuguu

SEQ ID NO: 4486 - RNA, 19 nt, Artificial Sequence
  synthetic
gcugguccaaggucauugu

SEQ ID NO: 4487 - RNA, 19 nt, Artificial Sequence
  synthetic
ugcugguccaaggucauug

SEQ ID NO: 4488 - RNA, 19 nt, Artificial Sequence
  synthetic
uugcugguccaaggucauu

SEQ ID NO: 4489 - RNA, 19 nt, Artificial Sequence
  synthetic
guugcugguccaaggucau

SEQ ID NO: 4490 - RNA, 19 nt, Artificial Sequence
  synthetic
uguugcugguccaagguca

SEQ ID NO: 4491 - RNA, 19 nt, Artificial Sequence
  synthetic
cuguugcugguccaagguc

SEQ ID NO: 4492 - RNA, 19 nt, Artificial Sequence
  synthetic
gcuguugcugguccaaggu

SEQ ID NO: 4493 - RNA, 19 nt, Artificial Sequence
  synthetic
ggcuguugcugguccaagg

SEQ ID NO: 4494 - RNA, 19 nt, Artificial Sequence
  synthetic
gggcuguugcugguccaag

SEQ ID NO: 4495 - RNA, 19 nt, Artificial Sequence
  synthetic
ugggcuguugcugguccaa

SEQ ID NO: 4496 - RNA, 19 nt, Artificial Sequence
  synthetic
cugggcuguugcuggucca

SEQ ID NO: 4497 - RNA, 19 nt, Artificial Sequence
  synthetic
ucugggcuguugcuggucc

SEQ ID NO: 4498 - RNA, 19 nt, Artificial Sequence
  synthetic
aucugggcuguugcugguc

SEQ ID NO: 4499 - RNA, 19 nt, Artificial Sequence
  synthetic
caucugggcuguugcuggu

SEQ ID NO: 4500 - RNA, 19 nt, Artificial Sequence
  synthetic
ccaucugggcuguugcugg

SEQ ID NO: 4501 - RNA, 19 nt, Artificial Sequence
  synthetic
gccaucugggcuguugcug

SEQ ID NO: 4502 - RNA, 19 nt, Artificial Sequence
  synthetic
agccaucugggcuguugcu

SEQ ID NO: 4503 - RNA, 19 nt, Artificial Sequence
  synthetic
gagccaucugggcuguugc

SEQ ID NO: 4504 - RNA, 19 nt, Artificial Sequence
  synthetic
agagccaucugggcuguug

SEQ ID NO: 4505 - RNA, 19 nt, Artificial Sequence
  synthetic
ugaugaacaauugaagagc

SEQ ID NO: 4506 - RNA, 19 nt, Artificial Sequence
  synthetic
agucuuugaugaacaauug

SEQ ID NO: 4507 - RNA, 19 nt, Artificial Sequence
  synthetic
uagucuuugaugaacaauu

SEQ ID NO: 4508 - RNA, 19 nt, Artificial Sequence
  synthetic
guagucuuugaugaacaau

SEQ ID NO: 4509 - RNA, 19 nt, Artificial Sequence
  synthetic
uguagucuuugaugaacaa

SEQ ID NO: 4510 - RNA, 19 nt, Artificial Sequence
  synthetic
cuguagucuuugaugaaca

SEQ ID NO: 4511 - RNA, 19 nt, Artificial Sequence
  synthetic
ucuguagucuuugaugaac

SEQ ID NO: 4512 - RNA, 19 nt, Artificial Sequence
  synthetic
aucuguagucuuugaugaa

SEQ ID NO: 4513 - RNA, 19 nt, Artificial Sequence
  synthetic
uaucuguagucuuugauga

SEQ ID NO: 4514 - RNA, 19 nt, Artificial Sequence
  synthetic
auaucuguagucuuugaug

SEQ ID NO: 4515 - RNA, 19 nt, Artificial Sequence
  synthetic
uauaucuguagucuuugau

SEQ ID NO: 4516 - RNA, 19 nt, Artificial Sequence
  synthetic
guauaucuguagucuuuga

SEQ ID NO: 4517 - RNA, 19 nt, Artificial Sequence
  synthetic
uguauaucuguagucuuug

SEQ ID NO: 4518 - RNA, 19 nt, Artificial Sequence
  synthetic
auguauaucuguagucuuu

SEQ ID NO: 4519 - RNA, 19 nt, Artificial Sequence
  synthetic
uauguauaucuguagucuu

SEQ ID NO: 4520 - RNA, 19 nt, Artificial Sequence
  synthetic
auauguauaucuguagucu

SEQ ID NO: 4521 - RNA, 19 nt, Artificial Sequence
  synthetic
uauauguauaucuguaguc

SEQ ID NO: 4522 - RNA, 19 nt, Artificial Sequence
  synthetic
cuauauguauaucuguagu

SEQ ID NO: 4523 - RNA, 19 nt, Artificial Sequence
  synthetic
ccuauauguauaucuguag

SEQ ID NO: 4524 - RNA, 19 nt, Artificial Sequence
  synthetic
accuauauguauaucugua

SEQ ID NO: 4525 - RNA, 19 nt, Artificial Sequence
  synthetic
caccuauauguauaucugu

SEQ ID NO: 4526 - RNA, 19 nt, Artificial Sequence
  synthetic
gcaccuauauguauaucug

SEQ ID NO: 4527 - RNA, 19 nt, Artificial Sequence
  synthetic
ggcaccuauauguauaucu

SEQ ID NO: 4528 - RNA, 19 nt, Artificial Sequence
  synthetic
uggcaccuauauguauauc

SEQ ID NO: 4529 - RNA, 19 nt, Artificial Sequence
  synthetic
auggcaccuauauguauau

SEQ ID NO: 4530 - RNA, 19 nt, Artificial Sequence
  synthetic
uauggcaccuauauguaua

SEQ ID NO: 4531 - RNA, 19 nt, Artificial Sequence
  synthetic
cuauggcaccuauauguau

SEQ ID NO: 4532 - RNA, 19 nt, Artificial Sequence
  synthetic
cuccucuauggcaccuaua

SEQ ID NO: 4533 - RNA, 19 nt, Artificial Sequence
  synthetic
gaauuugugugucuccucu

SEQ ID NO: 4534 - RNA, 19 nt, Artificial Sequence
  synthetic
ugaauuugugugucuccuc

SEQ ID NO: 4535 - RNA, 19 nt, Artificial Sequence
  synthetic
ucugaauuugugugucucc

SEQ ID NO: 4536 - RNA, 19 nt, Artificial Sequence
  synthetic
gucugaauuugugugucuc

SEQ ID NO: 4537 - RNA, 19 nt, Artificial Sequence
  synthetic
cgucugaauuugugugucu

SEQ ID NO: 4538 - RNA, 19 nt, Artificial Sequence
  synthetic
ucgucugaauuuguguguc

SEQ ID NO: 4539 - RNA, 19 nt, Artificial Sequence
  synthetic
cucgucugaauuugugugu

SEQ ID NO: 4540 - RNA, 19 nt, Artificial Sequence
  synthetic
ucucgucugaauuugugug

SEQ ID NO: 4541 - RNA, 19 nt, Artificial Sequence
  synthetic
uucucgucugaauuugugu

SEQ ID NO: 4542 - RNA, 19 nt, Artificial Sequence
  synthetic
cuucucgucugaauuugug

SEQ ID NO: 4543 - RNA, 19 nt, Artificial Sequence
  synthetic
ucuucucgucugaauuugu

SEQ ID NO: 4544 - RNA, 19 nt, Artificial Sequence
  synthetic
aucuucucgucugaauuug

SEQ ID NO: 4545 - RNA, 19 nt, Artificial Sequence
  synthetic
gaucuucucgucugaauuu

SEQ ID NO: 4546 - RNA, 19 nt, Artificial Sequence
  synthetic
ugaucuucucgucugaauu

SEQ ID NO: 4547 - RNA, 19 nt, Artificial Sequence
  synthetic
augaucuucucgucugaau

SEQ ID NO: 4548 - RNA, 19 nt, Artificial Sequence
  synthetic
aaugaucuucucgucugaa

SEQ ID NO: 4549 - RNA, 19 nt, Artificial Sequence
  synthetic
gaaugaucuucucgucuga

SEQ ID NO: 4550 - RNA, 19 nt, Artificial Sequence
  synthetic
cgaaugaucuucucgucug

SEQ ID NO: 4551 - RNA, 19 nt, Artificial Sequence
  synthetic
ucgaaugaucuucucgucu

SEQ ID NO: 4552 - RNA, 19 nt, Artificial Sequence
  synthetic
cucgaaugaucuucucguc

SEQ ID NO: 4553 - RNA, 19 nt, Artificial Sequence
  synthetic
gcucgaaugaucuucucgu

SEQ ID NO: 4554 - RNA, 19 nt, Artificial Sequence
  synthetic
agcucgaaugaucuucucg

SEQ ID NO: 4555 - RNA, 19 nt, Artificial Sequence
  synthetic
uagcucgaaugaucuucuc

SEQ ID NO: 4556 - RNA, 19 nt, Artificial Sequence
  synthetic
uuagcucgaaugaucuucu

SEQ ID NO: 4557 - RNA, 19 nt, Artificial Sequence
  synthetic
uuuagcucgaaugaucuuc

SEQ ID NO: 4558 - RNA, 19 nt, Artificial Sequence
  synthetic
cuuuagcucgaaugaucuu

SEQ ID NO: 4559 - RNA, 19 nt, Artificial Sequence
  synthetic
ucuuuagcucgaaugaucu

SEQ ID NO: 4560 - RNA, 19 nt, Artificial Sequence
  synthetic
uucuuuagcucgaaugauc

SEQ ID NO: 4561 - RNA, 19 nt, Artificial Sequence
  synthetic
cuucuuuagcucgaaugau

SEQ ID NO: 4562 - RNA, 19 nt, Artificial Sequence
  synthetic
gcuucuuuagcucgaauga

SEQ ID NO: 4563 - RNA, 19 nt, Artificial Sequence
  synthetic
agcuucuuuagcucgaaug

SEQ ID NO: 4564 - RNA, 19 nt, Artificial Sequence
  synthetic
cagcuucuuuagcucgaau

SEQ ID NO: 4565 - RNA, 19 nt, Artificial Sequence
  synthetic
acagcuucuuuagcucgaa

SEQ ID NO: 4566 - RNA, 19 nt, Artificial Sequence
  synthetic
cacagcuucuuuagcucga

SEQ ID NO: 4567 - RNA, 19 nt, Artificial Sequence
  synthetic
ccacagcuucuuuagcucg

SEQ ID NO: 4568 - RNA, 19 nt, Artificial Sequence
  synthetic
cccacagcuucuuuagcuc

SEQ ID NO: 4569 - RNA, 19 nt, Artificial Sequence
  synthetic
ucccacagcuucuuuagcu

SEQ ID NO: 4570 - RNA, 19 nt, Artificial Sequence
  synthetic
aucccacagcuucuuuagc

SEQ ID NO: 4571 - RNA, 19 nt, Artificial Sequence
  synthetic
gaucccacagcuucuuuag

SEQ ID NO: 4572 - RNA, 19 nt, Artificial Sequence
  synthetic
ugaucccacagcuucuuua

SEQ ID NO: 4573 - RNA, 19 nt, Artificial Sequence
  synthetic
uugaucccacagcuucuuu

SEQ ID NO: 4574 - RNA, 19 nt, Artificial Sequence
  synthetic
uuugaucccacagcuucuu

SEQ ID NO: 4575 - RNA, 19 nt, Artificial Sequence
  synthetic
guuugaucccacagcuucu

SEQ ID NO: 4576 - RNA, 19 nt, Artificial Sequence
  synthetic
gguuugaucccacagcuuc

SEQ ID NO: 4577 - RNA, 19 nt, Artificial Sequence
  synthetic
ggguuugaucccacagcuu

SEQ ID NO: 4578 - RNA, 19 nt, Artificial Sequence
  synthetic
uggguuugaucccacagcu

SEQ ID NO: 4579 - RNA, 19 nt, Artificial Sequence
  synthetic
uuggguuugaucccacagc

SEQ ID NO: 4580 - RNA, 19 nt, Artificial Sequence
  synthetic
auuggguuugaucccacag

SEQ ID NO: 4581 - RNA, 19 nt, Artificial Sequence
  synthetic
gauuggguuugaucccaca

SEQ ID NO: 4582 - RNA, 19 nt, Artificial Sequence
  synthetic
ugauuggguuugaucccac

SEQ ID NO: 4583 - RNA, 19 nt, Artificial Sequence
  synthetic
uugauuggguuugauccca

SEQ ID NO: 4584 - RNA, 19 nt, Artificial Sequence
  synthetic
guccugccuuugauugggu

SEQ ID NO: 4585 - RNA, 19 nt, Artificial Sequence
  synthetic
cuccaucugauaccaauag

SEQ ID NO: 4586 - RNA, 19 nt, Artificial Sequence
  synthetic
uguuguauaaguuuggucc

SEQ ID NO: 4587 - RNA, 19 nt, Artificial Sequence
  synthetic
gaaugugaagauuccggau

SEQ ID NO: 4588 - RNA, 19 nt, Artificial Sequence
  synthetic
acuuuaagcagacuucggg

SEQ ID NO: 4589 - RNA, 19 nt, Artificial Sequence
  synthetic
cccacuuuaagcagacuuc

SEQ ID NO: 4590 - RNA, 19 nt, Artificial Sequence
  synthetic
ucccacuuuaagcagacuu

SEQ ID NO: 4591 - RNA, 19 nt, Artificial Sequence
  synthetic
cucccacuuuaagcagacu

SEQ ID NO: 4592 - RNA, 19 nt, Artificial Sequence
  synthetic
gcucccacuuuaagcagac

SEQ ID NO: 4593 - RNA, 19 nt, Artificial Sequence
  synthetic
agcucccacuuuaagcaga

SEQ ID NO: 4594 - RNA, 19 nt, Artificial Sequence
  synthetic
uagcucccacuuuaagcag

SEQ ID NO: 4595 - RNA, 19 nt, Artificial Sequence
  synthetic
uuagcucccacuuuaagca

SEQ ID NO: 4596 - RNA, 19 nt, Artificial Sequence
  synthetic
auuagcucccacuuuaagc

SEQ ID NO: 4597 - RNA, 19 nt, Artificial Sequence
  synthetic
cauuagcucccacuuuaag

SEQ ID NO: 4598 - RNA, 19 nt, Artificial Sequence
  synthetic
ccauuagcucccacuuuaa

SEQ ID NO: 4599 - RNA, 19 nt, Artificial Sequence
  synthetic
uccauuagcucccacuuua

SEQ ID NO: 4600 - RNA, 19 nt, Artificial Sequence
  synthetic
auccauuagcucccacuuu

SEQ ID NO: 4601 - RNA, 19 nt, Artificial Sequence
  synthetic
cauccauuagcucccacuu

SEQ ID NO: 4602 - RNA, 19 nt, Artificial Sequence
  synthetic
ucauccauuagcucccacu

SEQ ID NO: 4603 - RNA, 19 nt, Artificial Sequence
  synthetic
cucauccauuagcucccac

SEQ ID NO: 4604 - RNA, 19 nt, Artificial Sequence
  synthetic
ccucauccauuagcuccca

SEQ ID NO: 4605 - RNA, 19 nt, Artificial Sequence
  synthetic
aaagucuuccccgauaauc

SEQ ID NO: 4606 - RNA, 19 nt, Artificial Sequence
  synthetic
agggauucaggggauuaca

SEQ ID NO: 4607 - RNA, 19 nt, Artificial Sequence
  synthetic
uauggcugacaaagggauu

SEQ ID NO: 4608 - RNA, 19 nt, Artificial Sequence
  synthetic
uuauggcugacaaagggau

SEQ ID NO: 4609 - RNA, 19 nt, Artificial Sequence
  synthetic
uuuauggcugacaaaggga

SEQ ID NO: 4610 - RNA, 19 nt, Artificial Sequence
  synthetic
cuuuauggcugacaaaggg

SEQ ID NO: 4611 - RNA, 19 nt, Artificial Sequence
  synthetic
ucuuuauggcugacaaagg

SEQ ID NO: 4612 - RNA, 19 nt, Artificial Sequence
  synthetic
ucucuuuauggcugacaaa

SEQ ID NO: 4613 - RNA, 19 nt, Artificial Sequence
  synthetic
cauuguuuacagacucaau

SEQ ID NO: 4614 - RNA, 19 nt, Artificial Sequence
  synthetic
cuacagcauuguuuacaga

SEQ ID NO: 4615 - RNA, 19 nt, Artificial Sequence
  synthetic
acuacagcauuguuuacag

SEQ ID NO: 4616 - RNA, 19 nt, Artificial Sequence
  synthetic
cacuacagcauuguuuaca

SEQ ID NO: 4617 - RNA, 19 nt, Artificial Sequence
  synthetic
ucacuacagcauuguuuac

SEQ ID NO: 4618 - RNA, 19 nt, Artificial Sequence
  synthetic
aucacuacagcauuguuua

SEQ ID NO: 4619 - RNA, 19 nt, Artificial Sequence
  synthetic
caucacuacagcauuguuu

SEQ ID NO: 4620 - RNA, 19 nt, Artificial Sequence
  synthetic
gcaucacuacagcauuguu

SEQ ID NO: 4621 - RNA, 19 nt, Artificial Sequence
  synthetic
ggcaucacuacagcauugu

SEQ ID NO: 4622 - RNA, 19 nt, Artificial Sequence
  synthetic
uggcaucacuacagcauug

SEQ ID NO: 4623 - RNA, 19 nt, Artificial Sequence
  synthetic
cuggcaucacuacagcauu

SEQ ID NO: 4624 - RNA, 19 nt, Artificial Sequence
  synthetic
gcuggcaucacuacagcau

SEQ ID NO: 4625 - RNA, 19 nt, Artificial Sequence
  synthetic
ggcuggcaucacuacagca

SEQ ID NO: 4626 - RNA, 19 nt, Artificial Sequence
  synthetic
gggcuggcaucacuacagc

SEQ ID NO: 4627 - RNA, 19 nt, Artificial Sequence
  synthetic
ugggcuggcaucacuacag

SEQ ID NO: 4628 - RNA, 19 nt, Artificial Sequence
  synthetic
augggcuggcaucacuaca

SEQ ID NO: 4629 - RNA, 19 nt, Artificial Sequence
  synthetic
caugggcuggcaucacuac

SEQ ID NO: 4630 - RNA, 19 nt, Artificial Sequence
  synthetic
ccaugggcuggcaucacua

SEQ ID NO: 4631 - RNA, 19 nt, Artificial Sequence
  synthetic
accaugggcuggcaucacu

SEQ ID NO: 4632 - RNA, 19 nt, Artificial Sequence
  synthetic
gaccaugggcuggcaucac

SEQ ID NO: 4633 - RNA, 19 nt, Artificial Sequence
  synthetic
ggaccaugggcuggcauca

SEQ ID NO: 4634 - RNA, 19 nt, Artificial Sequence
  synthetic
cuggaccaugggcuggcau

SEQ ID NO: 4635 - RNA, 19 nt, Artificial Sequence
  synthetic
gcuggaccaugggcuggca

SEQ ID NO: 4636 - RNA, 19 nt, Artificial Sequence
  synthetic
ggcuggaccaugggcuggc

SEQ ID NO: 4637 - RNA, 19 nt, Artificial Sequence
  synthetic
uggcuggaccaugggcugg

SEQ ID NO: 4638 - RNA, 19 nt, Artificial Sequence
  synthetic
uuggcuggaccaugggcug

SEQ ID NO: 4639 - RNA, 19 nt, Artificial Sequence
  synthetic
uuuggcuggaccaugggcu

SEQ ID NO: 4640 - RNA, 19 nt, Artificial Sequence
  synthetic
uuuuggcuggaccaugggc

SEQ ID NO: 4641 - RNA, 19 nt, Artificial Sequence
  synthetic
cuuuuggcuggaccauggg

SEQ ID NO: 4642 - RNA, 19 nt, Artificial Sequence
  synthetic
uacuuuuggcuggaccaug

SEQ ID NO: 4643 - RNA, 19 nt, Artificial Sequence
  synthetic
auacuuuuggcuggaccau

SEQ ID NO: 4644 - RNA, 19 nt, Artificial Sequence
  synthetic
cauacuuuuggcuggacca

SEQ ID NO: 4645 - RNA, 19 nt, Artificial Sequence
  synthetic
ccauacuuuuggcuggacc

SEQ ID NO: 4646 - RNA, 19 nt, Artificial Sequence
  synthetic
uccauacuuuuggcuggac

SEQ ID NO: 4647 - RNA, 19 nt, Artificial Sequence
  synthetic
uuccauacuuuuggcugga

SEQ ID NO: 4648 - RNA, 19 nt, Artificial Sequence
  synthetic
auuccauacuuuuggcugg

SEQ ID NO: 4649 - RNA, 19 nt, Artificial Sequence
  synthetic
uauuccauacuuuuggcug

SEQ ID NO: 4650 - RNA, 19 nt, Artificial Sequence
  synthetic
auauuccauacuuuuggcu

SEQ ID NO: 4651 - RNA, 19 nt, Artificial Sequence
  synthetic
cauauuccauacuuuuggc

SEQ ID NO: 4652 - RNA, 19 nt, Artificial Sequence
  synthetic
ucauauuccauacuuuugg

SEQ ID NO: 4653 - RNA, 19 nt, Artificial Sequence
  synthetic
aucauauuccauacuuuug

SEQ ID NO: 4654 - RNA, 19 nt, Artificial Sequence
  synthetic
caucauauuccauacuuuu

SEQ ID NO: 4655 - RNA, 19 nt, Artificial Sequence
  synthetic
gcaucauauuccauacuuu

SEQ ID NO: 4656 - RNA, 19 nt, Artificial Sequence
  synthetic
ggcaucauauuccauacuu

SEQ ID NO: 4657 - RNA, 19 nt, Artificial Sequence
  synthetic
cggcaucauauuccauacu

SEQ ID NO: 4658 - RNA, 19 nt, Artificial Sequence
  synthetic
acggcaucauauuccauac

SEQ ID NO: 4659 - RNA, 19 nt, Artificial Sequence
  synthetic
aacggcaucauauuccaua

SEQ ID NO: 4660 - RNA, 19 nt, Artificial Sequence
  synthetic
caacggcaucauauuccau

SEQ ID NO: 4661 - RNA, 19 nt, Artificial Sequence
  synthetic
gcaacggcaucauauucca

SEQ ID NO: 4662 - RNA, 19 nt, Artificial Sequence
  synthetic
ugcaacggcaucauauucc

SEQ ID NO: 4663 - RNA, 19 nt, Artificial Sequence
  synthetic
uugcaacggcaucauauuc

SEQ ID NO: 4664 - RNA, 19 nt, Artificial Sequence
  synthetic
guugcaacggcaucauauu

SEQ ID NO: 4665 - RNA, 19 nt, Artificial Sequence
  synthetic
aguugcaacggcaucauau

SEQ ID NO: 4666 - RNA, 19 nt, Artificial Sequence
  synthetic
uaguugcaacggcaucaua

SEQ ID NO: 4667 - RNA, 19 nt, Artificial Sequence
  synthetic
guaguugcaacggcaucau

SEQ ID NO: 4668 - RNA, 19 nt, Artificial Sequence
  synthetic
uguaguugcaacggcauca

SEQ ID NO: 4669 - RNA, 19 nt, Artificial Sequence
  synthetic
guguaguugcaacggcauc

SEQ ID NO: 4670 - RNA, 19 nt, Artificial Sequence
  synthetic
uguguaguugcaacggcau

SEQ ID NO: 4671 - RNA, 19 nt, Artificial Sequence
  synthetic
guguguaguugcaacggca

SEQ ID NO: 4672 - RNA, 19 nt, Artificial Sequence
  synthetic
aguguguaguugcaacggc

SEQ ID NO: 4673 - RNA, 19 nt, Artificial Sequence
  synthetic
gaguguguaguugcaacgg

SEQ ID NO: 4674 - RNA, 19 nt, Artificial Sequence
  synthetic
ggaguguguaguugcaacg

SEQ ID NO: 4675 - RNA, 19 nt, Artificial Sequence
  synthetic
aggaguguguaguugcaac

SEQ ID NO: 4676 - RNA, 19 nt, Artificial Sequence
  synthetic
caggaguguguaguugcaa

SEQ ID NO: 4677 - RNA, 19 nt, Artificial Sequence
  synthetic
ccaggaguguguaguugca

SEQ ID NO: 4678 - RNA, 19 nt, Artificial Sequence
  synthetic
uccaggaguguguaguugc

SEQ ID NO: 4679 - RNA, 19 nt, Artificial Sequence
  synthetic
auccaggaguguguaguug

SEQ ID NO: 4680 - RNA, 19 nt, Artificial Sequence
  synthetic
aauccaggaguguguaguu

SEQ ID NO: 4681 - RNA, 19 nt, Artificial Sequence
  synthetic
gaauccaggaguguguagu

SEQ ID NO: 4682 - RNA, 19 nt, Artificial Sequence
  synthetic
ggaauccaggaguguguag

SEQ ID NO: 4683 - RNA, 19 nt, Artificial Sequence
  synthetic
gggaauccaggagugugua

SEQ ID NO: 4684 - RNA, 19 nt, Artificial Sequence
  synthetic
ugggaauccaggagugugu

SEQ ID NO: 4685 - RNA, 19 nt, Artificial Sequence
  synthetic
uugggaauccaggagugug

SEQ ID NO: 4686 - RNA, 19 nt, Artificial Sequence
  synthetic
cuugggaauccaggagugu

SEQ ID NO: 4687 - RNA, 19 nt, Artificial Sequence
  synthetic
ucuugggaauccaggagug

SEQ ID NO: 4688 - RNA, 19 nt, Artificial Sequence
  synthetic
cucuugggaauccaggagu

SEQ ID NO: 4689 - RNA, 19 nt, Artificial Sequence
  synthetic
ccucuugggaauccaggag

SEQ ID NO: 4690 - RNA, 19 nt, Artificial Sequence
  synthetic
uccucuugggaauccagga

SEQ ID NO: 4691 - RNA, 19 nt, Artificial Sequence
  synthetic
uuccucuugggaauccagg

SEQ ID NO: 4692 - RNA, 19 nt, Artificial Sequence
  synthetic
guuccucuugggaauccag

SEQ ID NO: 4693 - RNA, 19 nt, Artificial Sequence
  synthetic
gguuccucuugggaaucca

SEQ ID NO: 4694 - RNA, 19 nt, Artificial Sequence
  synthetic
cgguuccucuugggaaucc

SEQ ID NO: 4695 - RNA, 19 nt, Artificial Sequence
  synthetic
gcgguuccucuugggaauc

SEQ ID NO: 4696 - RNA, 19 nt, Artificial Sequence
  synthetic
agcgguuccucuugggaau

SEQ ID NO: 4697 - RNA, 19 nt, Artificial Sequence
  synthetic
gagcgguuccucuugggaa

SEQ ID NO: 4698 - RNA, 19 nt, Artificial Sequence
  synthetic
agagcgguuccucuuggga

SEQ ID NO: 4699 - RNA, 19 nt, Artificial Sequence
  synthetic
uagagcgguuccucuuggg

SEQ ID NO: 4700 - RNA, 19 nt, Artificial Sequence
  synthetic
auagagcgguuccucuugg

SEQ ID NO: 4701 - RNA, 19 nt, Artificial Sequence
  synthetic
aauagagcgguuccucuug

SEQ ID NO: 4702 - RNA, 19 nt, Artificial Sequence
  synthetic
gaauagagcgguuccucuu

SEQ ID NO: 4703 - RNA, 19 nt, Artificial Sequence
  synthetic
agaauagagcgguuccucu

SEQ ID NO: 4704 - RNA, 19 nt, Artificial Sequence
  synthetic
ggcuuguguugagaauaga

SEQ ID NO: 4705 - RNA, 19 nt, Artificial Sequence
  synthetic
uuccccuuuggcuuguguu

SEQ ID NO: 4706 - RNA, 19 nt, Artificial Sequence
  synthetic
auuccccuuuggcuugugu

SEQ ID NO: 4707 - RNA, 19 nt, Artificial Sequence
  synthetic
aauuccccuuuggcuugug

SEQ ID NO: 4708 - RNA, 19 nt, Artificial Sequence
  synthetic
gaauuccccuuuggcuugu

SEQ ID NO: 4709 - RNA, 19 nt, Artificial Sequence
  synthetic
agaauuccccuuuggcuug

SEQ ID NO: 4710 - RNA, 19 nt, Artificial Sequence
  synthetic
aagaauuccccuuuggcuu

SEQ ID NO: 4711 - RNA, 19 nt, Artificial Sequence
  synthetic
caagaauuccccuuuggcu

SEQ ID NO: 4712 - RNA, 19 nt, Artificial Sequence
  synthetic
ucaagaauuccccuuuggc

SEQ ID NO: 4713 - RNA, 19 nt, Artificial Sequence
  synthetic
cucaagaauuccccuuugg

SEQ ID NO: 4714 - RNA, 19 nt, Artificial Sequence
  synthetic
ccucaagaauuccccuuug

SEQ ID NO: 4715 - RNA, 19 nt, Artificial Sequence
  synthetic
uccucaagaauuccccuuu

SEQ ID NO: 4716 - RNA, 19 nt, Artificial Sequence
  synthetic
auccucaagaauuccccuu

SEQ ID NO: 4717 - RNA, 19 nt, Artificial Sequence
  synthetic
cauccucaagaauuccccu

SEQ ID NO: 4718 - RNA, 19 nt, Artificial Sequence
  synthetic
ucauccucaagaauucccc

SEQ ID NO: 4719 - RNA, 19 nt, Artificial Sequence
  synthetic
uucauccucaagaauuccc

SEQ ID NO: 4720 - RNA, 19 nt, Artificial Sequence
  synthetic
guucauccucaagaauucc

SEQ ID NO: 4721 - RNA, 19 nt, Artificial Sequence
  synthetic
uguucauccucaagaauuc

SEQ ID NO: 4722 - RNA, 19 nt, Artificial Sequence
  synthetic
cuguucauccucaagaauu

SEQ ID NO: 4723 - RNA, 19 nt, Artificial Sequence
  synthetic
ucuguucauccucaagaau

SEQ ID NO: 4724 - RNA, 19 nt, Artificial Sequence
  synthetic
aucuguucauccucaagaa

SEQ ID NO: 4725 - RNA, 19 nt, Artificial Sequence
  synthetic
caucuguucauccucaaga

SEQ ID NO: 4726 - RNA, 19 nt, Artificial Sequence
  synthetic
acaucuguucauccucaag

SEQ ID NO: 4727 - RNA, 19 nt, Artificial Sequence
  synthetic
uacaucuguucauccucaa

SEQ ID NO: 4728 - RNA, 19 nt, Artificial Sequence
  synthetic
guacaucuguucauccuca

SEQ ID NO: 4729 - RNA, 19 nt, Artificial Sequence
  synthetic
gguacaucuguucauccuc

SEQ ID NO: 4730 - RNA, 19 nt, Artificial Sequence
  synthetic
ugguacaucuguucauccu

SEQ ID NO: 4731 - RNA, 19 nt, Artificial Sequence
  synthetic
ucugguacaucuguucauc

SEQ ID NO: 4732 - RNA, 19 nt, Artificial Sequence
  synthetic
cgaacaaguugcagcacuu

SEQ ID NO: 4733 - RNA, 19 nt, Artificial Sequence
  synthetic
ucgaacaaguugcagcacu

SEQ ID NO: 4734 - RNA, 19 nt, Artificial Sequence
  synthetic
cucgaacaaguugcagcac

SEQ ID NO: 4735 - RNA, 19 nt, Artificial Sequence
  synthetic
ucucgaacaaguugcagca

SEQ ID NO: 4736 - RNA, 19 nt, Artificial Sequence
  synthetic
uucucgaacaaguugcagc

SEQ ID NO: 4737 - RNA, 19 nt, Artificial Sequence
  synthetic
uuucucgaacaaguugcag

SEQ ID NO: 4738 - RNA, 19 nt, Artificial Sequence
  synthetic
auuucucgaacaaguugca

SEQ ID NO: 4739 - RNA, 19 nt, Artificial Sequence
  synthetic
aauuucucgaacaaguugc

SEQ ID NO: 4740 - RNA, 19 nt, Artificial Sequence
  synthetic
aaauuucucgaacaaguug

SEQ ID NO: 4741 - RNA, 19 nt, Artificial Sequence
  synthetic
aaaauuucucgaacaaguu

SEQ ID NO: 4742 - RNA, 19 nt, Artificial Sequence
  synthetic
aaaaauuucucgaacaagu

SEQ ID NO: 4743 - RNA, 19 nt, Artificial Sequence
  synthetic
gaaaaauuucucgaacaag

SEQ ID NO: 4744 - RNA, 19 nt, Artificial Sequence
  synthetic
ggaaaaauuucucgaacaa

SEQ ID NO: 4745 - RNA, 19 nt, Artificial Sequence
  synthetic
gggaaaaauuucucgaaca

SEQ ID NO: 4746 - RNA, 19 nt, Artificial Sequence
  synthetic
agggaaaaauuucucgaac

SEQ ID NO: 4747 - RNA, 19 nt, Artificial Sequence
  synthetic
uagggaaaaauuucucgaa

SEQ ID NO: 4748 - RNA, 19 nt, Artificial Sequence
  synthetic
cuagggaaaaauuucucga

SEQ ID NO: 4749 - RNA, 19 nt, Artificial Sequence
  synthetic
acuagggaaaaauuucucg

SEQ ID NO: 4750 - RNA, 19 nt, Artificial Sequence
  synthetic
uacuagggaaaaauuucuc

SEQ ID NO: 4751 - RNA, 19 nt, Artificial Sequence
  synthetic
cuacuagggaaaaauuucu

SEQ ID NO: 4752 - RNA, 19 nt, Artificial Sequence
  synthetic
acuacuagggaaaaauuuc

SEQ ID NO: 4753 - RNA, 19 nt, Artificial Sequence
  synthetic
aacuacuagggaaaaauuu

SEQ ID NO: 4754 - RNA, 19 nt, Artificial Sequence
  synthetic
gaacuacuagggaaaaauu

SEQ ID NO: 4755 - RNA, 19 nt, Artificial Sequence
  synthetic
ugaacuacuagggaaaaau

SEQ ID NO: 4756 - RNA, 19 nt, Artificial Sequence
  synthetic
augaacuacuagggaaaaa

SEQ ID NO: 4757 - RNA, 19 nt, Artificial Sequence
  synthetic
uaugaacuacuagggaaaa

SEQ ID NO: 4758 - RNA, 19 nt, Artificial Sequence
  synthetic
auaugaacuacuagggaaa

SEQ ID NO: 4759 - RNA, 19 nt, Artificial Sequence
  synthetic
uauaugaacuacuagggaa

SEQ ID NO: 4760 - RNA, 19 nt, Artificial Sequence
  synthetic
cuauaugaacuacuaggga

SEQ ID NO: 4761 - RNA, 19 nt, Artificial Sequence
  synthetic
ccuauaugaacuacuaggg

SEQ ID NO: 4762 - RNA, 19 nt, Artificial Sequence
  synthetic
uccuauaugaacuacuagg

SEQ ID NO: 4763 - RNA, 19 nt, Artificial Sequence
  synthetic
cuccuauaugaacuacuag

SEQ ID NO: 4764 - RNA, 19 nt, Artificial Sequence
  synthetic
ucuccuauaugaacuacua

SEQ ID NO: 4765 - RNA, 19 nt, Artificial Sequence
  synthetic
gucuccuauaugaacuacu

SEQ ID NO: 4766 - RNA, 19 nt, Artificial Sequence
  synthetic
ggucuccuauaugaacuac

SEQ ID NO: 4767 - RNA, 19 nt, Artificial Sequence
  synthetic
ccggucuccuauaugaacu

SEQ ID NO: 4768 - RNA, 19 nt, Artificial Sequence
  synthetic
ccaugcuagaaauuccaac

SEQ ID NO: 4769 - RNA, 19 nt, Artificial Sequence
  synthetic
accaugcuagaaauuccaa

SEQ ID NO: 4770 - RNA, 19 nt, Artificial Sequence
  synthetic
caccaugcuagaaauucca

SEQ ID NO: 4771 - RNA, 19 nt, Artificial Sequence
  synthetic
ccaccaugcuagaaauucc

SEQ ID NO: 4772 - RNA, 19 nt, Artificial Sequence
  synthetic
uccaccaugcuagaaauuc

SEQ ID NO: 4773 - RNA, 19 nt, Artificial Sequence
  synthetic
cuccaccaugcuagaaauu

SEQ ID NO: 4774 - RNA, 19 nt, Artificial Sequence
  synthetic
ccuccaccaugcuagaaau

SEQ ID NO: 4775 - RNA, 19 nt, Artificial Sequence
  synthetic
gccuccaccaugcuagaaa

SEQ ID NO: 4776 - RNA, 19 nt, Artificial Sequence
  synthetic
ggccuccaccaugcuagaa

SEQ ID NO: 4777 - RNA, 19 nt, Artificial Sequence
  synthetic
uggccuccaccaugcuaga

SEQ ID NO: 4778 - RNA, 19 nt, Artificial Sequence
  synthetic
auggccuccaccaugcuag

SEQ ID NO: 4779 - RNA, 19 nt, Artificial Sequence
  synthetic
cauggccuccaccaugcua

SEQ ID NO: 4780 - RNA, 19 nt, Artificial Sequence
  synthetic
ccauggccuccaccaugcu

SEQ ID NO: 4781 - RNA, 19 nt, Artificial Sequence
  synthetic
accauggccuccaccaugc

SEQ ID NO: 4782 - RNA, 19 nt, Artificial Sequence
  synthetic
caccauggccuccaccaug

SEQ ID NO: 4783 - RNA, 19 nt, Artificial Sequence
  synthetic
acaccauggccuccaccau

SEQ ID NO: 4784 - RNA, 19 nt, Artificial Sequence
  synthetic
gacaccauggccuccacca

SEQ ID NO: 4785 - RNA, 19 nt, Artificial Sequence
  synthetic
agacaccauggccuccacc

SEQ ID NO: 4786 - RNA, 19 nt, Artificial Sequence
  synthetic
uagacaccauggccuccac

SEQ ID NO: 4787 - RNA, 19 nt, Artificial Sequence
  synthetic
cuagacaccauggccucca

SEQ ID NO: 4788 - RNA, 19 nt, Artificial Sequence
  synthetic
ccuagacaccauggccucc

SEQ ID NO: 4789 - RNA, 19 nt, Artificial Sequence
  synthetic
cccuagacaccauggccuc

SEQ ID NO: 4790 - RNA, 19 nt, Artificial Sequence
  synthetic
gcccuagacaccauggccu

SEQ ID NO: 4791 - RNA, 19 nt, Artificial Sequence
  synthetic
ggcccuagacaccauggcc

SEQ ID NO: 4792 - RNA, 19 nt, Artificial Sequence
  synthetic
gggcccuagacaccauggc

SEQ ID NO: 4793 - RNA, 19 nt, Artificial Sequence
  synthetic
cgggcccuagacaccaugg

SEQ ID NO: 4794 - RNA, 19 nt, Artificial Sequence
  synthetic
ccgggcccuagacaccaug

SEQ ID NO: 4795 - RNA, 19 nt, Artificial Sequence
  synthetic
uccgggcccuagacaccau

SEQ ID NO: 4796 - RNA, 19 nt, Artificial Sequence
  synthetic
auccgggcccuagacacca

SEQ ID NO: 4797 - RNA, 19 nt, Artificial Sequence
  synthetic
aauccgggcccuagacacc

SEQ ID NO: 4798 - RNA, 19 nt, Artificial Sequence
  synthetic
caauccgggcccuagacac

SEQ ID NO: 4799 - RNA, 19 nt, Artificial Sequence
  synthetic
ucaauccgggcccuagaca

SEQ ID NO: 4800 - RNA, 19 nt, Artificial Sequence
  synthetic
aucaauccgggcccuagac

SEQ ID NO: 4801 - RNA, 19 nt, Artificial Sequence
  synthetic
caucaauccgggcccuaga

SEQ ID NO: 4802 - RNA, 19 nt, Artificial Sequence
  synthetic
gcaucaauccgggcccuag

SEQ ID NO: 4803 - RNA, 19 nt, Artificial Sequence
  synthetic
ggcaucaauccgggcccua

SEQ ID NO: 4804 - RNA, 19 nt, Artificial Sequence
  synthetic
uggcaucaauccgggcccu

SEQ ID NO: 4805 - RNA, 19 nt, Artificial Sequence
  synthetic
cuggcaucaauccgggccc

SEQ ID NO: 4806 - RNA, 19 nt, Artificial Sequence
  synthetic
ucuggcaucaauccgggcc

SEQ ID NO: 4807 - RNA, 19 nt, Artificial Sequence
  synthetic
uucuggcaucaauccgggc

SEQ ID NO: 4808 - RNA, 19 nt, Artificial Sequence
  synthetic
auucuggcaucaauccggg

SEQ ID NO: 4809 - RNA, 19 nt, Artificial Sequence
  synthetic
aauucuggcaucaauccgg

SEQ ID NO: 4810 - RNA, 19 nt, Artificial Sequence
  synthetic
caauucuggcaucaauccg

SEQ ID NO: 4811 - RNA, 19 nt, Artificial Sequence
  synthetic
ucaauucuggcaucaaucc

SEQ ID NO: 4812 - RNA, 19 nt, Artificial Sequence
  synthetic
gucaauucuggcaucaauc

SEQ ID NO: 4813 - RNA, 19 nt, Artificial Sequence
  synthetic
agucaauucuggcaucaau

SEQ ID NO: 4814 - RNA, 19 nt, Artificial Sequence
  synthetic
aagucaauucuggcaucaa

SEQ ID NO: 4815 - RNA, 19 nt, Artificial Sequence
  synthetic
gaagucaauucuggcauca

SEQ ID NO: 4816 - RNA, 19 nt, Artificial Sequence
  synthetic
cgaagucaauucuggcauc

SEQ ID NO: 4817 - RNA, 19 nt, Artificial Sequence
  synthetic
ucgaagucaauucuggcau

SEQ ID NO: 4818 - RNA, 19 nt, Artificial Sequence
  synthetic
cucgaagucaauucuggca

SEQ ID NO: 4819 - RNA, 19 nt, Artificial Sequence
  synthetic
acucgaagucaauucuggc

SEQ ID NO: 4820 - RNA, 19 nt, Artificial Sequence
  synthetic
gacucgaagucaauucugg

SEQ ID NO: 4821 - RNA, 19 nt, Artificial Sequence
  synthetic
agacucgaagucaauucug

SEQ ID NO: 4822 - RNA, 19 nt, Artificial Sequence
  synthetic
cagacucgaagucaauucu

SEQ ID NO: 4823 - RNA, 19 nt, Artificial Sequence
  synthetic
ccagacucgaagucaauuc

SEQ ID NO: 4824 - RNA, 19 nt, Artificial Sequence
  synthetic
uccagacucgaagucaauu

SEQ ID NO: 4825 - RNA, 19 nt, Artificial Sequence
  synthetic
guccagacucgaagucaau

SEQ ID NO: 4826 - RNA, 19 nt, Artificial Sequence
  synthetic
cguccagacucgaagucaa

SEQ ID NO: 4827 - RNA, 19 nt, Artificial Sequence
  synthetic
ccguccagacucgaaguca

SEQ ID NO: 4828 - RNA, 19 nt, Artificial Sequence
  synthetic
uccguccagacucgaaguc

SEQ ID NO: 4829 - RNA, 19 nt, Artificial Sequence
  synthetic
auccguccagacucgaagu

SEQ ID NO: 4830 - RNA, 19 nt, Artificial Sequence
  synthetic
aauccguccagacucgaag

SEQ ID NO: 4831 - RNA, 19 nt, Artificial Sequence
  synthetic
uaauccguccagacucgaa

SEQ ID NO: 4832 - RNA, 19 nt, Artificial Sequence
  synthetic
uuaauccguccagacucga

SEQ ID NO: 4833 - RNA, 19 nt, Artificial Sequence
  synthetic
cuuaauccguccagacucg

SEQ ID NO: 4834 - RNA, 19 nt, Artificial Sequence
  synthetic
ucuuaauccguccagacuc

SEQ ID NO: 4835 - RNA, 19 nt, Artificial Sequence
  synthetic
uucuuaauccguccagacu

SEQ ID NO: 4836 - RNA, 19 nt, Artificial Sequence
  synthetic
cuucuuaauccguccagac

SEQ ID NO: 4837 - RNA, 19 nt, Artificial Sequence
  synthetic
ccuucuuaauccguccaga

SEQ ID NO: 4838 - RNA, 19 nt, Artificial Sequence
  synthetic
uccuucuuaauccguccag

SEQ ID NO: 4839 - RNA, 19 nt, Artificial Sequence
  synthetic
uuccuucuuaauccgucca

SEQ ID NO: 4840 - RNA, 19 nt, Artificial Sequence
  synthetic
cuuccuucuuaauccgucc

SEQ ID NO: 4841 - RNA, 19 nt, Artificial Sequence
  synthetic
ucuuccuucuuaauccguc

SEQ ID NO: 4842 - RNA, 19 nt, Artificial Sequence
  synthetic
ucaugaucucagagaacuc

SEQ ID NO: 4843 - RNA, 19 nt, Artificial Sequence
  synthetic
ucuucaugaucucagagaa

SEQ ID NO: 4844 - RNA, 19 nt, Artificial Sequence
  synthetic
aucuucaugaucucagaga

SEQ ID NO: 4845 - RNA, 19 nt, Artificial Sequence
  synthetic
gaucuucaugaucucagag

SEQ ID NO: 4846 - RNA, 19 nt, Artificial Sequence
  synthetic
agaucuucaugaucucaga

SEQ ID NO: 4847 - RNA, 19 nt, Artificial Sequence
  synthetic
cagaucuucaugaucucag

SEQ ID NO: 4848 - RNA, 19 nt, Artificial Sequence
  synthetic
acagaucuucaugaucuca

SEQ ID NO: 4849 - RNA, 19 nt, Artificial Sequence
  synthetic
aacagaucuucaugaucuc

SEQ ID NO: 4850 - RNA, 19 nt, Artificial Sequence
  synthetic
gaacagaucuucaugaucu

SEQ ID NO: 4851 - RNA, 19 nt, Artificial Sequence
  synthetic
ggaacagaucuucaugauc

SEQ ID NO: 4852 - RNA, 19 nt, Artificial Sequence
  synthetic
uggaacagaucuucaugau

SEQ ID NO: 4853 - RNA, 19 nt, Artificial Sequence
  synthetic
guggaacagaucuucauga

SEQ ID NO: 4854 - RNA, 19 nt, Artificial Sequence
  synthetic
gguggaacagaucuucaug

SEQ ID NO: 4855 - RNA, 19 nt, Artificial Sequence
  synthetic
ugguggaacagaucuucau

SEQ ID NO: 4856 - RNA, 19 nt, Artificial Sequence
  synthetic
augguggaacagaucuuca

SEQ ID NO: 4857 - RNA, 19 nt, Artificial Sequence
  synthetic
aaugguggaacagaucuuc

SEQ ID NO: 4858 - RNA, 19 nt, Artificial Sequence
  synthetic
caaugguggaacagaucuu

SEQ ID NO: 4859 - RNA, 19 nt, Artificial Sequence
  synthetic
ucaaugguggaacagaucu

SEQ ID NO: 4860 - RNA, 19 nt, Artificial Sequence
  synthetic
uucaaugguggaacagauc

SEQ ID NO: 4861 - RNA, 19 nt, Artificial Sequence
  synthetic
cuucaaugguggaacagau

SEQ ID NO: 4862 - RNA, 19 nt, Artificial Sequence
  synthetic
ucuucaaugguggaacaga

SEQ ID NO: 4863 - RNA, 19 nt, Artificial Sequence
  synthetic
uucuucaaugguggaacag

SEQ ID NO: 4864 - RNA, 19 nt, Artificial Sequence
  synthetic
guucuucaaugguggaaca

SEQ ID NO: 4865 - RNA, 19 nt, Artificial Sequence
  synthetic
aguucuucaaugguggaac

SEQ ID NO: 4866 - RNA, 19 nt, Artificial Sequence
  synthetic
gaguucuucaaugguggaa

SEQ ID NO: 4867 - RNA, 19 nt, Artificial Sequence
  synthetic
ugaguucuucaauggugga

SEQ ID NO: 4868 - RNA, 19 nt, Artificial Sequence
  synthetic
cugaguucuucaauggugg

SEQ ID NO: 4869 - RNA, 19 nt, Artificial Sequence
  synthetic
ucugaguucuucaauggug

SEQ ID NO: 4870 - RNA, 19 nt, Artificial Sequence
  synthetic
gucugaguucuucaauggu

SEQ ID NO: 4871 - RNA, 19 nt, Artificial Sequence
  synthetic
cgucugaguucuucaaugg

SEQ ID NO: 4872 - RNA, 19 nt, Artificial Sequence
  synthetic
ccgucugaguucuucaaug

SEQ ID NO: 4873 - RNA, 19 nt, Artificial Sequence
  synthetic
gccgucugaguucuucaau

SEQ ID NO: 4874 - RNA, 19 nt, Artificial Sequence
  synthetic
ugccgucugaguucuucaa

SEQ ID NO: 4875 - RNA, 19 nt, Artificial Sequence
  synthetic
uugccgucugaguucuuca

SEQ ID NO: 4876 - RNA, 19 nt, Artificial Sequence
  synthetic
uuugccgucugaguucuuc

SEQ ID NO: 4877 - RNA, 19 nt, Artificial Sequence
  synthetic
uuuugccgucugaguucuu

SEQ ID NO: 4878 - RNA, 19 nt, Artificial Sequence
  synthetic
uuuuugccgucugaguucu

SEQ ID NO: 4879 - RNA, 19 nt, Artificial Sequence
  synthetic
auuuuugccgucugaguuc

SEQ ID NO: 4880 - RNA, 19 nt, Artificial Sequence
  synthetic
uauuuuugccgucugaguu

SEQ ID NO: 4881 - RNA, 19 nt, Artificial Sequence
  synthetic
uuauuuuugccgucugagu

SEQ ID NO: 4882 - RNA, 19 nt, Artificial Sequence
  synthetic
auuauuuuugccgucugag

SEQ ID NO: 4883 - RNA, 19 nt, Artificial Sequence
  synthetic
caagcuaaauucauuauuu

SEQ ID NO: 4884 - RNA, 19 nt, Artificial Sequence
  synthetic
gcauuuuuucaugaaggac

SEQ ID NO: 4885 - RNA, 19 nt, Artificial Sequence
  synthetic
aaagagugaauaagagagg

SEQ ID NO: 4886 - RNA, 19 nt, Artificial Sequence
  synthetic
auugagaaaauaaggccuc

SEQ ID NO: 4887 - RNA, 19 nt, Artificial Sequence
  synthetic
aaguacgguuuuaggaguc

SEQ ID NO: 4888 - RNA, 19 nt, Artificial Sequence
  synthetic
aaguauggaauaugaugcc

SEQ ID NO: 4889 - RNA, 19 nt, Artificial Sequence
  synthetic
uaccugaggauaaugagcc

SEQ ID NO: 4890 - RNA, 19 nt, Artificial Sequence
  synthetic
aaaagcuugaacagucugg

SEQ ID NO: 4891 - RNA, 19 nt, Artificial Sequence
  synthetic
aagugcugcaacuuguucg

SEQ ID NO: 4892 - RNA, 19 nt, Artificial Sequence
  synthetic
aaaguauggaauaugaugc

SEQ ID NO: 4893 - RNA, 23 nt, Artificial Sequence
  synthetic
auggucacacaaagaacaauagg

SEQ ID NO: 4894 - RNA, 23 nt, Artificial Sequence
  synthetic
aacccaauugauggaccacuacc

SEQ ID NO: 4895 - RNA, 23 nt, Artificial Sequence
  synthetic
aacagugauaaagaacaacauga

SEQ ID NO: 4896 - RNA, 23 nt, Artificial Sequence
  synthetic
ugggcaaaagaaauacaccaaga

SEQ ID NO: 4897 - RNA, 23 nt, Artificial Sequence
  synthetic
agccaacaccauagaaguuuuua

SEQ ID NO: 4898 - RNA, 23 nt, Artificial Sequence
  synthetic
guccagccaaaaguauggaauau

SEQ ID NO: 4899 - RNA, 23 nt, Artificial Sequence
  synthetic
ugggcauguucaacaugcuaagu

SEQ ID NO: 4900 - RNA, 23 nt, Artificial Sequence
  synthetic
aagagacaacaugaccaagaaaa

SEQ ID NO: 4901 - DNA, 21 bp, Artificial Sequence
  synthetic
  misc_feature (1)..(19): ribonucleotides
ggucacacaaagaacaauatt

SEQ ID NO: 4902 - DNA, 21 bp, Artificial Sequence
  synthetic
  misc_feature (1)..(19): ribonucleotides
cccaauugauggaccacuatt

SEQ ID NO: 4903 - DNA, 21 bp, Artificial Sequence
  synthetic
  misc_feature (1)..(19): ribonucleotides
cagugauaaagaacaacautt

SEQ ID NO: 4904 - DNA, 21 bp, Artificial Sequence
  synthetic
  misc_feature (1)..(19): ribonucleotides
ggcaaaagaaauacaccaatt

SEQ ID NO: 4905 - DNA, 21 bp, Artificial Sequence
  synthetic
  misc_feature (1)..(19): ribonucleotides
ccaacaccauagaaguuuutt

SEQ ID NO: 4906 - DNA, 21 bp, Artificial Sequence
  synthetic
  misc_feature (1)..(19): ribonucleotides
ccagccaaaaguauggaautt

SEQ ID NO: 4907 - DNA, 21 bp, Artificial Sequence
  synthetic
  misc_feature (1)..(19): ribonucleotides
ggcauguucaacaugcuaatt

SEQ ID NO: 4908 - DNA, 21 bp, Artificial Sequence
  synthetic
  misc_feature (1)..(19): ribonucleotides
gagacaacaugaccaagaatt

SEQ ID NO: 4909 - DNA, 21 bp, Artificial Sequence
  synthetic
  misc_feature (1)..(19): ribonucleotides
uauuguucuuugugugacctt

SEQ ID NO: 4910 - DNA, 21 bp, Artificial Sequence
  synthetic
  misc_feature (1)..(19): ribonucleotides
uagugguccaucaauugggtt

SEQ ID NO: 4911 - DNA, 21 bp, Artificial Sequence
  synthetic
  misc_feature (1)..(19): ribonucleotides
auguuguucuuuaucacugtt

SEQ ID NO: 4912 - DNA, 21 bp, Artificial Sequence
  synthetic
  misc_feature (1)..(19): ribonucleotides
uugguguauuucuuuugcctt

SEQ ID NO: 4913 - DNA, 21 bp, Artificial Sequence
  synthetic
  misc_feature (1)..(19): ribonucleotides
aaaacuucuaugguguuggtt

SEQ ID NO: 4914 - DNA, 21 bp, Artificial Sequence
  synthetic
  misc_feature (1)..(19): ribonucleotides
auuccauacuuuuggcuggtt

SEQ ID NO: 4915 - DNA, 21 bp, Artificial Sequence
  synthetic
  misc_feature (1)..(19): ribonucleotides
uuagcauguugaacaugcctt

SEQ ID NO: 4916 - DNA, 21 bp, Artificial Sequence
  synthetic
  misc_feature (1)..(19): ribonucleotides
uucuuggucauguugucuctt

SEQ ID NO: 4917 - DNA, 21 bp, Artificial Sequence
  synthetic
  misc_feature (1)..(19): ribonucleotides
  misc_feature (1)..(1): 5'-3 attached deoxy abasic moiety
  misc_feature (3)..(4): 2'-deoxy-2'-fluoro
  misc_feature (6)..(6): 2'-deoxy-2'-fluoro
  misc_feature (8)..(8): 2'-deoxy-2'-fluoro
  misc_feature (15)..(15): 2'-deoxy-2'-fluoro
  misc_feature (18)..(18): 2'-deoxy-2'-fluoro
  misc_feature (21)..(21): 3'-3 attached deoxy abasic moiety
ggucacacaaagaacaauatt

SEQ ID NO: 4918 - DNA, 21 bp, Artificial Sequence
  synthetic
  misc_feature (1)..(19): ribonucleotides
  misc_feature (1)..(3): 2'-deoxy-2'-fluoro
  misc_feature (1)..(1): 5'-3 attached deoxy abasic moiety
  misc_feature (6)..(7): 2'-deoxy-2'-fluoro
  misc_feature (10)..(10): 2'-deoxy-2'-fluoro
  misc_feature (14)..(15): 2'-deoxy-2'-fluoro
  misc_feature (17)..(18): 2'-deoxy-2'-fluoro
  misc_feature (21)..(21): 3'-3 attached deoxy abasic moiety
cccaauugauggaccacuatt

SEQ ID NO: 4919 - DNA, 21 bp, Artificial Sequence
  synthetic
  misc_feature (1)..(19): ribonucleotides
  misc_feature (1)..(1): 2'-deoxy-2'-fluoro
  misc_feature (1)..(1): 5'-3 attached deoxy abasic moiety
  misc_feature (4)..(4): 2'-deoxy-2'-fluoro
  misc_feature (7)..(7): 2'-deoxy-2'-fluoro
  misc_feature (14)..(14): 2'-deoxy-2'-fluoro
  misc_feature (17)..(17): 2'-deoxy-2'-fluoro
  misc_feature (19)..(19): 2'-deoxy-2'-fluoro
  misc_feature (21)..(21): 3'-3 attached deoxy abasic moiety
cagugauaaagaacaacautt

SEQ ID NO: 4920 - DNA, 21 bp, Artificial Sequence
  synthetic
  misc_feature (1)..(19): ribonucleotides
  misc_feature (1)..(1): 5'-3 attached deoxy abasic moiety
  misc_feature (3)..(3): 2'-deoxy-2'-fluoro
  misc_feature (12)..(12): 2'-deoxy-2'-fluoro
  misc_feature (14)..(14): 2'-deoxy-2'-fluoro
  misc_feature (16)..(17): 2'-deoxy-2'-fluoro
  misc_feature (21)..(21): 3'-3 attached deoxy abasic moiety
ggcaaaagaaauacaccaatt

SEQ ID NO: 4921 - DNA, 21 bp, Artificial Sequence
  synthetic
  misc_feature (1)..(19): ribonucleotides
  misc_feature (1)..(2): 2'-deoxy-2'-fluoro
  misc_feature (1)..(1): 5'-3 attached deoxy abasic moiety
  misc_feature (5)..(5): 2'-deoxy-2'-fluoro
  misc_feature (7)..(8): 2'-deoxy-2'-fluoro
  misc_feature (10)..(10): 2'-deoxy-2'-fluoro
  misc_feature (16)..(19): 2'-deoxy-2'-fluoro
  misc_feature (21)..(21): 3'-3 attached deoxy abasic moiety
ccaacaccauagaaguuuutt

SEQ ID NO: 4922 - DNA, 21 bp, Artificial Sequence
  synthetic
  misc_feature (1)..(19): ribonucleotides
  misc_feature (1)..(2): 2'-deoxy-2'-fluoro
  misc_feature (1)..(1): 5'-3 attached deoxy abasic moiety
  misc_feature (5)..(6): 2'-deoxy-2'-fluoro
  misc_feature (12)..(12): 2'-deoxy-2'-fluoro
  misc_feature (14)..(14): 2'-deoxy-2'-fluoro
  misc_feature (19)..(19): 2'-deoxy-2'-fluoro
  misc_feature (21)..(21): 3'-3 attached deoxy abasic moiety
ccagccaaaaguauggaautt

SEQ ID NO: 4923 - DNA, 21 bp, Artificial Sequence
  synthetic
  misc_feature (1)..(19): ribonucleotides
  misc_feature (1)..(1): 5'-3 attached deoxy abasic moiety
  misc_feature (3)..(3): 2'-deoxy-2'-fluoro
  misc_feature (5)..(5): 2'-deoxy-2'-fluoro
  misc_feature (7)..(9): 2'-deoxy-2'-fluoro
  misc_feature (12)..(12): 2'-deoxy-2'-fluoro
  misc_feature (14)..(14): 2'-deoxy-2'-fluoro
  misc_feature (16)..(17): 2'-deoxy-2'-fluoro
  misc_feature (21)..(21): 3'-3 attached deoxy abasic moiety
ggcauguucaacaugcuaatt

SEQ ID NO: 4924 - DNA, 21 bp, Artificial Sequence
  synthetic
  misc_feature (1)..(19): ribonucleotides
  misc_feature (1)..(1): 5'-3 attached deoxy abasic moiety
  misc_feature (5)..(5): 2'-deoxy-2'-fluoro
  misc_feature (8)..(8): 2'-deoxy-2'-fluoro
  misc_feature (10)..(10): 2'-deoxy-2'-fluoro
  misc_feature (13)..(14): 2'-deoxy-2'-fluoro
  misc_feature (21)..(21): 3'-3 attached deoxy abasic moiety
gagacaacaugaccaagaatt

SEQ ID NO: 4925 - DNA, 21 bp, Artificial Sequence
  synthetic
  misc_feature (1)..(19): ribonucleotides
  misc_feature (1)..(1): 2'-deoxy-2'-fluoro
  misc_feature (3)..(4): 2'-deoxy-2'-fluoro
  misc_feature (6)..(11): 2'-deoxy-2'-fluoro
  misc_feature (13)..(13): 2'-deoxy-2'-fluoro
  misc_feature (15)..(15): 2'-deoxy-2'-fluoro
  misc_feature (18)..(19): 2'-deoxy-2'-fluoro
  misc_feature (20)..(21): phosphorothioate linkage
uauuguucuuugugugacctt

SEQ ID NO: 4926 - DNA, 21 bp, Artificial Sequence
  synthetic
  misc_feature (1)..(19): ribonucleotides
  misc_feature (1)..(1): 2'-deoxy-2'-fluoro
  misc_feature (4)..(4): 2'-deoxy-2'-fluoro
  misc_feature (7)..(9): 2'-deoxy-2'-fluoro
  misc_feature (11)..(12): 2'-deoxy-2'-fluoro
  misc_feature (15)..(16): 2'-deoxy-2'-fluoro
  misc_feature (20)..(21): phosphorothioate linkage
uagugguccaucaauugggtt

SEQ ID NO: 4927 - DNA, 21 bp, Artificial Sequence
  synthetic
  misc_feature (1)..(19): ribonucleotides
  misc_feature (2)..(2): 2'-deoxy-2'-fluoro
  misc_feature (4)..(5): 2'-deoxy-2'-fluoro
  misc_feature (7)..(12): 2'-deoxy-2'-fluoro
  misc_feature (14)..(15): 2'-deoxy-2'-fluoro
  misc_feature (17)..(18): 2'-deoxy-2'-fluoro
  misc_feature (20)..(21): phosphorothoiate linkage
auguuguucuuuaucacugtt

SEQ ID NO: 4928 - DNA, 21 bp, Artificial Sequence
  synthetic
  misc_feature (1)..(19): ribonucleotides
  misc_feature (1)..(2): 2'-deoxy-2'-fluoro
  misc_feature (5)..(5): 2'-deoxy-2'-fluoro
  misc_feature (7)..(7): 2'-deoxy-2'-fluoro
  misc_feature (9)..(16): 2'-deoxy-2'-fluoro
  misc_feature (18)..(19): 2'-deoxy-2'-fluoro
  misc_feature (20)..(21): phosphorothioate linkage
uugguguauuucuuuugcctt

SEQ ID NO: 4929 - DNA, 21 bp, Artificial Sequence
  synthetic
  misc_feature (1)..(19): ribonucleotides
  misc_feature (5)..(9): 2'-deoxy-2'-fluoro
  misc_feature (11)..(11): 2'-deoxy-2'-fluoro
  misc_feature (14)..(14): 2'-deoxy-2'-fluoro
  misc_feature (16)..(17): 2'-deoxy-2'-fluoro
  misc_feature (20)..(21): phosphorothioate linkage
aaaacuucuaugguguuggtt

SEQ ID NO: 4930 - DNA, 21 bp, Artificial Sequence
  synthetic
  misc_feature (1)..(19): ribonucleotides
  misc_feature (2)..(5): 2'-deoxy-2'-fluoro
  misc_feature (7)..(7): 2'-deoxy-2'-fluoro
  misc_feature (9)..(13): 2'-deoxy-2'-fluoro
  misc_feature (16)..(17): 2'-deoxy-2'-fluoro
  misc_feature (20)..(21): phosphorothioate linkage
auuccauacuuuuggcuggtt

SEQ ID NO: 4931 - DNA, 21 bp, Artificial Sequence
  synthetic
  misc_feature (1)..(19): ribonucleotides
  misc_feature (1)..(2): 2'-deoxy-2'-fluoro
  misc_feature (5)..(5): 2'-deoxy-2'-fluoro
  misc_feature (7)..(7): 2'-deoxy-2'-fluoro
  misc_feature (9)..(10): 2'-deoxy-2'-fluoro
  misc_feature (14)..(14): 2'-deoxy-2'-fluoro
  misc_feature (16)..(16): 2'-deoxy-2'-fluoro
  misc_feature (18)..(19): 2'-deoxy-2'-fluoro
  misc_feature (20)..(21): phosphorothioate linkage
uuagcauguugaacaugcctt

SEQ ID NO: 4932 - DNA, 21 bp, Artificial Sequence
  synthetic
  misc_feature (1)..(19): ribonucleotides
  misc_feature (1)..(5): 2'-deoxy-2'-fluoro
  misc_feature (8)..(9): 2'-deoxy-2'-fluoro
  misc_feature (11)..(11): 2'-deoxy-2'-fluoro
  misc_feature (13)..(14): 2'-deoxy-2'-fluoro
  misc_feature (16)..(19): 2'-deoxy-2'-fluoro
  misc_feature (20)..(21): phosphorothioate linkage
uucuuggucauguugucuctt

SEQ ID NO: 4933 - DNA, 21 bp, Artificial Sequence
  synthetic
  misc_feature (1)..(19): ribonucleotides
  misc_feature (1)..(2): deoxy
  misc_feature (1)..(1): 5'-3 attached deoxy abasic moiety
  misc_feature (3)..(4): 2'-deoxy-2'-fluoro
  misc_feature (5)..(5): deoxy
  misc_feature (6)..(6): 2'-deoxy-2'-fluoro
  misc_feature (7)..(7): deoxy
  misc_feature (8)..(8): 2'-deoxy-2'-fluoro
  misc_feature (9)..(14): deoxy
  misc_feature (15)..(15): 2'-deoxy-2'-fluoro
  misc_feature (16)..(17): deoxy
  misc_feature (18)..(18): 2'-deoxy-2'-fluoro
  misc_feature (19)..(19): deoxy
  misc_feature (21)..(21): 3'-3 attached deoxy abasic moiety
ggucacacaaagaacaauatt

SEQ ID NO: 4934 - DNA, 21 bp, Artificial Sequence
  synthetic
  misc_feature (1)..(19): ribonucleotides
  misc_feature (1)..(3): 2'-deoxy-2'-fluoro
  misc_feature (1)..(1): 5'-3 attached deoxy abasic moiety
  misc_feature (4)..(5): deoxy
  misc_feature (6)..(7): 2'-deoxy-2'-fluoro
  misc_feature (8)..(9): deoxy
  misc_feature (10)..(10): 2'-deoxy-2'-fluoro
  misc_feature (11)..(13): deoxy
  misc_feature (14)..(15): 2'-deoxy-2'-fluoro
  misc_feature (16)..(16): deoxy
  misc_feature (17)..(18): 2'-deoxy-2'-fluoro
  misc_feature (19)..(19): deoxy
  misc_feature (21)..(21): 3'-3 attached deoxy abasic moiety
cccaauugauggaccacuatt

SEQ ID NO: 4935 - DNA, 21 bp, Artificial Sequence
  synthetic
  misc_feature (1)..(19): ribonucleotides
  misc_feature (1)..(1): 2'-deoxy-2'-fluoro
  misc_feature (1)..(1): 5'-3 attached deoxy abasic moiety
  misc_feature (2)..(3): deoxy
  misc_feature (4)..(4): 2'-deoxy-2'-fluoro
  misc_feature (5)..(6): deoxy
  misc_feature (7)..(7): 2'-deoxy-2'-fluoro
  misc_feature (8)..(13): deoxy
  misc_feature (14)..(14): 2'-deoxy-2'-fluoro
  misc_feature (15)..(16): deoxy
  misc_feature (17)..(17): 2'-deoxy-2'-fluoro
  misc_feature (18)..(18): deoxy
  misc_feature (19)..(19): 2'-deoxy-2'-fluoro
  misc_feature (21)..(21): 3'-3 attached deoxy abasic moiety
cagugauaaagaacaacautt

SEQ ID NO: 4936 - DNA, 21 bp, Artificial Sequence
  synthetic
  misc_feature (1)..(19): ribonucleotides
  misc_feature (1)..(2): deoxy
  misc_feature (1)..(1): 5'-3 attached deoxy abasic moiety
  misc_feature (3)..(3): 2'-deoxy-2'-fluoro
  misc_feature (4)..(11): deoxy
  misc_feature (12)..(12): 2'-deoxy-2'-fluoro
  misc_feature (13)..(13): deoxy
  misc_feature (14)..(14): 2'-deoxy-2'-fluoro
  misc_feature (15)..(15): deoxy
  misc_feature (16)..(17): 2'-deoxy-2'-fluoro
  misc_feature (18)..(19): deoxy
  misc_feature (21)..(21): 3'-3 attached deoxy abasic moiety
ggcaaaagaaauacaccaatt

SEQ ID NO: 4937 - DNA, 21 bp, Artificial Sequence
  synthetic
  misc_feature (1)..(19): ribonucleotides
  misc_feature (1)..(2): 2'-deoxy-2'-fluoro
  misc_feature (1)..(1): 5'-3 attached deoxy abasic moiety
  misc_feature (3)..(4): deoxy
  misc_feature (5)..(5): 2'-deoxy-2'-fluoro
  misc_feature (6)..(6): deoxy
  misc_feature (7)..(8): 2'-deoxy-2'-fluoro
  misc_feature (9)..(9): deoxy
  misc_feature (10)..(10): 2'-deoxy-2'-fluoro
  misc_feature (11)..(15): deoxy
  misc_feature (16)..(19): 2'-deoxy-2'-fluoro
  misc_feature (21)..(21): 3'-3 attached deoxy abasic moiety
ccaacaccauagaaguuuutt

SEQ ID NO: 4938 - DNA, 21 bp, Artificial Sequence
  synthetic
  misc_feature (1)..(19): ribonucleotides
  misc_feature (1)..(2): 2'-deoxy-2'-fluoro
  misc_feature (1)..(1): 5'-3 attached deoxy abasic moiety
  misc_feature (3)..(4): deoxy
  misc_feature (5)..(6): 2'-deoxy-2'-fluoro
  misc_feature (7)..(11): deoxy
  misc_feature (12)..(12): 2'-deoxy-2'-fluoro
  misc_feature (13)..(13): deoxy
  misc_feature (14)..(14): 2'-deoxy-2'-fluoro
  misc_feature (15)..(18): deoxy
  misc_feature (19)..(19): 2'-deoxy-2'-fluoro
  misc_feature (21)..(21): 3'-3 attached deoxy abasic moiety
ccagccaaaaguauggaautt

SEQ ID NO: 4939 - DNA, 21 bp, Artificial Sequence
  synthetic
  misc_feature (1)..(19): ribonucleotides
  misc_feature (1)..(2): deoxy
  misc_feature (1)..(1): 5'-3 attached deoxy abasic moiety
  misc_feature (3)..(3): 2'-deoxy-2'-fluoro
  misc_feature (4)..(4): deoxy
  misc_feature (5)..(5): 2'-deoxy-2'-fluoro
  misc_feature (6)..(6): deoxy
  misc_feature (7)..(9): 2'-deoxy-2'-fluoro
  misc_feature (10)..(11): deoxy
  misc_feature (12)..(12): 2'-deoxy-2'-fluoro
  misc_feature (13)..(13): deoxy
  misc_feature (14)..(14): 2'-deoxy-2'-fluoro
  misc_feature (15)..(15): deoxy
  misc_feature (16)..(17): 2'-deoxy-2'-fluoro
  misc_feature (18)..(19): deoxy
  misc_feature (21)..(21): 3'-3 attached deoxy abasic moiety
ggcauguucaacaugcuaatt

SEQ ID NO: 4940 - DNA, 21 bp, Artificial Sequence
  synthetic
  misc_feature (1)..(19): ribonucleotides
  misc_feature (1)..(4): deoxy
  misc_feature (1)..(1): 5'-3 attached deoxy abasic moiety
  misc_feature (5)..(5): 2'-deoxy-2'-fluoro
  misc_feature (6)..(7): deoxy
  misc_feature (8)..(8): 2'-deoxy-2'-fluoro
  misc_feature (9)..(9): deoxy
  misc_feature (10)..(10): 2'-deoxy-2'-fluoro
  misc_feature (11)..(12): deoxy
  misc_feature (13)..(14): 2'-deoxy-2'-fluoro
  misc_feature (15)..(19): deoxy
  misc_feature (21)..(21): 3'-3 attached deoxy abasic moiety
gagacaacaugaccaagaatt

SEQ ID NO: 4941 - DNA, 21 bp, Artificial Sequence
  synthetic
  misc_feature (1)..(19): ribonucleotides
  misc_feature (1)..(1): 2'-deoxy-2'-fluoro
  misc_feature (2)..(2): deoxy
  misc_feature (3)..(4): 2'-deoxy-2'-fluoro
  misc_feature (5)..(5): deoxy
  misc_feature (6)..(11): 2'-deoxy-2'-fluoro
  misc_feature (12)..(12): deoxy
  misc_feature (13)..(13): 2'-deoxy-2'-fluoro
  misc_feature (14)..(14): deoxy
  misc_feature (15)..(15): 2'-deoxy-2'-fluoro
  misc_feature (16)..(17): deoxy
  misc_feature (18)..(19): 2'-deoxy-2'-fluoro
  misc_feature (20)..(21): phosphorothioate linkage
uauuguucuuugugugacctt

SEQ ID NO: 4942 - DNA, 21 bp, Artificial Sequence
  synthetic
  misc_feature (1)..(19): ribonucleotides
  misc_feature (1)..(1): 2'-deoxy-2'-fluoro
  misc_feature (2)..(3): deoxy
  misc_feature (4)..(4): 2'-deoxy-2'-fluoro
  misc_feature (5)..(6): deoxy
  misc_feature (7)..(9): 2'-deoxy-2'-fluoro
  misc_feature (10)..(10): deoxy
  misc_feature (11)..(12): 2'-deoxy-2'-fluoro
  misc_feature (13)..(14): deoxy
  misc_feature (15)..(16): 2'-deoxy-2'-fluoro
  misc_feature (17)..(19): deoxy
  misc_feature (20)..(21): phosphorothioate linkage
uagugguccaucaauugggtt

SEQ ID NO: 4943 - DNA, 21 bp, Artificial Sequence
  synthetic
  misc_feature (1)..(19): ribonucleotides
  misc_feature (1)..(1): deoxy
  misc_feature (2)..(2): 2'-deoxy-2'-fluoro
  misc_feature (3)..(3): deoxy
  misc_feature (4)..(5): 2'-deoxy-2'-fluoro
  misc_feature (6)..(6): deoxy
  misc_feature (7)..(12): 2'-deoxy-2'-fluoro
  misc_feature (13)..(13): deoxy
  misc_feature (14)..(15): 2'-deoxy-2'-fluoro
  misc_feature (16)..(16): deoxy
  misc_feature (17)..(18): 2'-deoxy-2'-fluoro
  misc_feature (19)..(19): deoxy
  misc_feature (20)..(21): phosphorothioate linkage
auguuguucuuuaucacugtt

SEQ ID NO: 4944 - DNA, 21 bp, Artificial Sequence
  synthetic
  misc_feature (1)..(19): ribonucleotides
  misc_feature (1)..(2): 2'-deoxy-2'-fluoro
  misc_feature (3)..(4): deoxy
  misc_feature (5)..(5): 2'-deoxy-2'-fluoro
  misc_feature (6)..(6): deoxy
  misc_feature (7)..(7): 2'-deoxy-2'-fluoro
  misc_feature (8)..(8): deoxy
  misc_feature (9)..(16): 2'-deoxy-2'-fluoro
  misc_feature (17)..(17): deoxy
  misc_feature (18)..(19): 2'-deoxy-2'-fluoro
  misc_feature (20)..(21): phosphorothioate linkage
uugguguauuucuuuugcctt

SEQ ID NO: 4945 - DNA, 21 bp, Artificial Sequence
  synthetic
  misc_feature (1)..(19): ribonucleotides
  misc_feature (1)..(4): deoxy
  misc_feature (5)..(9): 2'-deoxy-2'-fluoro
  misc_feature (10)..(10): deoxy
  misc_feature (11)..(11): 2'-deoxy-2'-fluoro
  misc_feature (12)..(13): deoxy
  misc_feature (14)..(14): 2'-deoxy-2'-fluoro
  misc_feature (15)..(15): deoxy
  misc_feature (16)..(17): 2'-deoxy-2'-fluoro
  misc_feature (18)..(19): deoxy
  misc_feature (20)..(21): phosphorothioate linkage
aaaacuucuaugguguuggtt

SEQ ID NO: 4946 - DNA, 21 bp, Artificial Sequence
  synthetic
  misc_feature (1)..(19): ribonucleotides
  misc_feature (1)..(1): deoxy
  misc_feature (2)..(5): 2'-deoxy-2'-fluoro
  misc_feature (6)..(6): deoxy
  misc_feature (7)..(7): 2'-deoxy-2'-fluoro
  misc_feature (8)..(8): deoxy
  misc_feature (9)..(13): 2'-deoxy-2'-fluoro
  misc_feature (14)..(15): deoxy
  misc_feature (16)..(17): 2'-deoxy-2'-fluoro
  misc_feature (18)..(19): deoxy
  misc_feature (20)..(21): phosphorothioate linkage
auuccauacuuuuggcuggtt

SEQ ID NO: 4947 - DNA, 21 bp, Artificial Sequence
  synthetic
  misc_feature (1)..(19): ribonucleotides
  misc_feature (1)..(2): 2'-deoxy-2'-fluoro
  misc_feature (3)..(4): deoxy
  misc_feature (5)..(5): 2'-deoxy-2'-fluoro
  misc_feature (6)..(6): deoxy
  misc_feature (7)..(7): 2'-deoxy-2'-fluoro
  misc_feature (8)..(8): deoxy
  misc_feature (9)..(10): 2'-deoxy-2'-fluoro
  misc_feature (11)..(13): deoxy
  misc_feature (14)..(14): 2'-deoxy-2'-fluoro
  misc_feature (15)..(15): deoxy
  misc_feature (16)..(16): 2'-deoxy-2'-fluoro
  misc_feature (17)..(17): deoxy
  misc_feature (18)..(19): 2'-deoxy-2'-fluoro
  misc_feature (20)..(21): phosphorothioate linkage
uuagcauguugaacaugcctt

SEQ ID NO: 4948 - DNA, 21 bp, Artificial Sequence
  synthetic
  misc_feature (1)..(19): ribonucleotides
  misc_feature (1)..(5): 2'-deoxy-2'-fluoro
  misc_feature (6)..(7): deoxy
  misc_feature (8)..(9): 2'-deoxy-2'-fluoro
  misc_feature (10)..(10): deoxy
  misc_feature (11)..(11): 2'-deoxy-2'-fluoro
  misc_feature (12)..(12): deoxy
  misc_feature (13)..(14): 2'-deoxy-2'-fluoro
  misc_feature (15)..(15): deoxy
  misc_feature (16)..(19): 2'-deoxy-2'-fluoro
  misc_feature (20)..(21): phosphorothioate linkage
uucuuggucauguugucuctt

SEQ ID NO: 4949 - DNA, 21 bp, Artificial Sequence
  synthetic
  misc_feature (1)..(19): ribonucleotides
  misc_feature (1)..(2): 2'-O-methyl
  misc_feature (1)..(1): 5'-3 attached deoxy abasic moiety
  misc_feature (3)..(4): 2'-deoxy-2'-fluoro
  misc_feature (5)..(5): 2'-O-methyl
  misc_feature (6)..(6): 2'-deoxy-2'-fluoro
  misc_feature (7)..(7): 2'-O-methyl
  misc_feature (8)..(8): 2'-deoxy-2'-fluoro
  misc_feature (9)..(14): 2'-O-methyl
  misc_feature (15)..(15): 2'-deoxy-2'-fluoro
  misc_feature (16)..(17): 2'-O-methyl
  misc_feature (18)..(18): 2'-deoxy-2'-fluoro
  misc_feature (19)..(19): 2'-O-methyl
  misc_feature (21)..(21): 3'-3 attached deoxy abasic moiety
ggucacacaaagaacaauatt

SEQ ID NO: 4950 - DNA, 21 bp, Artificial Sequence
  synthetic
  misc_feature (1)..(19): ribonucleotides
  misc_feature (1)..(3): 2'-deoxy-2'-fluoro
  misc_feature (1)..(1): 5'-3 attached deoxy abasic moiety
  misc_feature (4)..(5): 2'-O-methyl
  misc_feature (6)..(7): 2'-deoxy-2'-fluoro
  misc_feature (8)..(9): 2'-O-methyl
  misc_feature (10)..(10): 2'-deoxy-2'-fluoro
  misc_feature (11)..(13): 2'-O-methyl
  misc_feature (14)..(15): 2'-deoxy-2'-fluoro
  misc_feature (16)..(16): 2'-O-methyl
  misc_feature (17)..(18): 2'-deoxy-2'-fluoro
  misc_feature (19)..(19): 2'-O-methyl
  misc_feature (21)..(21): 3'-3 attached deoxy abasic moiety
cccaauugauggaccacuatt

SEQ ID NO: 4951 - DNA, 21 bp, Artificial Sequence
  synthetic
  misc_feature (1)..(19): ribonucleotides
  misc_feature (1)..(1): 2'-deoxy-2'-fluoro
  misc_feature (1)..(1): 5'-3 attached deoxy abasic moiety
  misc_feature (2)..(3): 2'-O-methyl
  misc_feature (4)..(4): 2'-deoxy-2'-fluoro
  misc_feature (5)..(6): 2'-O-methyl
  misc_feature (7)..(7): 2'-deoxy-2'-fluoro
  misc_feature (8)..(13): 2'-O-methyl
  misc_feature (14)..(14): 2'-deoxy-2'-fluoro
  misc_feature (15)..(16): 2'-O-methyl
  misc_feature (17)..(17): 2'-deoxy-2'-fluoro
  misc_feature (18)..(18): 2'-O-methyl
  misc_feature (19)..(19): 2'-deoxy-2'-fluoro
  misc_feature (21)..(21): 3'-3 attached deoxy abasic moiety
cagugauaaagaacaacautt

SEQ ID NO: 4952 - DNA, 21 bp, Artificial Sequence
  synthetic
  misc_feature (1)..(19): ribonucleotides
  misc_feature (1)..(2): 2'-O-methyl
  misc_feature (1)..(1): 5'-3 attached deoxy abasic moiety
  misc_feature (3)..(3): 2'-deoxy-2'-fluoro
  misc_feature (4)..(11): 2'-O-methyl
  misc_feature (12)..(12): 2'-deoxy-2'-fluoro
  misc_feature (13)..(13): 2'-O-methyl
  misc_feature (14)..(14): 2'-deoxy-2'-fluoro
  misc_feature (15)..(15): 2'-O-methyl
  misc_feature (16)..(17): 2'-deoxy-2'-fluoro
  misc_feature (18)..(19): 2'-O-methyl
  misc_feature (21)..(21): 3'-3 attached deoxy abasic moiety
ggcaaaagaaauacaccaatt

SEQ ID NO: 4953 - DNA, 21 bp, Artificial Sequence
  synthetic
  misc_feature (1)..(19): ribonucleotides
  misc_feature (1)..(2): 2'-deoxy-2'-fluoro
  misc_feature (1)..(1): 5'-3 attached deoxy abasic moiety
  misc_feature (3)..(4): 2'-O-methyl
  misc_feature (5)..(5): 2'-deoxy-2'-fluoro
  misc_feature (6)..(6): 2'-O-methyl
  misc_feature (7)..(8): 2'-deoxy-2'-fluoro
  misc_feature (9)..(9): 2'-O-methyl
  misc_feature (10)..(10): 2'-deoxy-2'-fluoro
  misc_feature (11)..(15): 2'-O-methyl
  misc_feature (16)..(19): 2'-deoxy-2'-fluoro
  misc_feature (21)..(21): 3'-3 attached deoxy abasic moiety
ccaacaccauagaaguuuutt

SEQ ID NO: 4954 - DNA, 21 bp, Artificial Sequence
  synthetic
  misc_feature (1)..(19): ribonucleotides
  misc_feature (1)..(2): 2'-deoxy-2'-fluoro
  misc_feature (1)..(1): 5'-3 attached deoxy abasic moiety
  misc_feature (3)..(4): 2'-O-methyl
  misc_feature (5)..(6): 2'-deoxy-2'-fluoro
  misc_feature (7)..(11): 2'-O-methyl
  misc_feature (12)..(12): 2'-deoxy-2'-fluoro
  misc_feature (13)..(13): 2'-O-methyl
  misc_feature (14)..(14): 2'-deoxy-2'-fluoro
  misc_feature (15)..(18): 2'-O-methyl
  misc_feature (19)..(19): 2'-deoxy-2'-fluoro
  misc_feature (21)..(21): 3'-3 attached deoxy abasic moiety
ccagccaaaaguauggaautt

SEQ ID NO: 4955 - DNA, 21 bp, Artificial Sequence
  synthetic
  misc_feature (1)..(19): ribonucleotides
  misc_feature (1)..(2): 2'-O-methyl
  misc_feature (1)..(1): 5'-3 attached deoxy abasic moiety
  misc_feature (3)..(3): 2'-deoxy-2'-fluoro
  misc_feature (4)..(4): 2'-O-methyl
  misc_feature (5)..(5): 2'-deoxy-2'-fluoro
  misc_feature (6)..(6): 2'-O-methyl
  misc_feature (7)..(9): 2'-deoxy-2'-fluoro
  misc_feature (10)..(11): 2'-O-methyl
  misc_feature (12)..(12): 2'-deoxy-2'-fluoro
  misc_feature (13)..(13): 2'-O-methyl
  misc_feature (14)..(14): 2'-deoxy-2'-fluoro
  misc_feature (15)..(15): 2'-O-methyl
  misc_feature (16)..(17): 2'-deoxy-2'-fluoro
  misc_feature (18)..(19): 2'-O-methyl
  misc_feature (21)..(21): 3'-3 attached deoxy abasic moiety
ggcauguucaacaugcuaatt

SEQ ID NO: 4956 - DNA, 21 bp, Artificial Sequence
  synthetic
  misc_feature (1)..(19): ribonucleotides
  misc_feature (1)..(4): 2'-O-methyl
  misc_feature (1)..(1): 5'-3 attached deoxy abasic moiety
  misc_feature (5)..(5): 2'-deoxy-2'-fluoro
  misc_feature (6)..(7): 2'-O-methyl
  misc_feature (8)..(8): 2'-deoxy-2'-fluoro
  misc_feature (9)..(9): 2'-O-methyl
  misc_feature (10)..(10): 2'-deoxy-2'-fluoro
  misc_feature (11)..(12): 2'-O-methyl
  misc_feature (13)..(14): 2'-deoxy-2'-fluoro
  misc_feature (15)..(19): 2'-O-methyl
  misc_feature (21)..(21): 3'-3 attached deoxy abasic moiety
gagacaacaugaccaagaatt

SEQ ID NO: 4957 - DNA, 21 bp, Artificial Sequence
  synthetic
  misc_feature (1)..(19): ribonucleotides
  misc_feature (1)..(1): 2'-deoxy-2'-fluoro
  misc_feature (2)..(2): 2'-O-methyl
  misc_feature (3)..(4): 2'-deoxy-2'-fluoro
  misc_feature (5)..(5): 2'-O-methyl
  misc_feature (6)..(11): 2'-deoxy-2'-fluoro
  misc_feature (12)..(12): 2'-O-methyl
  misc_feature (13)..(13): 2'-deoxy-2'-fluoro
  misc_feature (14)..(14): 2'-O-methyl
  misc_feature (15)..(15): 2'-deoxy-2'-fluoro
  misc_feature (16)..(17): 2'-O-methyl
  misc_feature (18)..(19): 2'-deoxy-2'-fluoro
  misc_feature (20)..(21): phosphorothioate linkage
uauuguucuuugugugacctt

SEQ ID NO: 4958 - DNA, 21 bp, Artificial Sequence
  synthetic
  misc_feature (1)..(19): ribonucleotides
  misc_feature (1)..(1): 2'-deoxy-2'-fluoro
  misc_feature (2)..(3): 2'-O-methyl
  misc_feature (4)..(4): 2'-deoxy-2'-fluoro
  misc_feature (5)..(6): 2'-O-methyl
  misc_feature (7)..(9): 2'-deoxy-2'-fluoro
  misc_feature (10)..(10): 2'-O-methyl
  misc_feature (11)..(12): 2'-deoxy-2'-fluoro
  misc_feature (13)..(14): 2'-O-methyl
  misc_feature (15)..(16): 2'-deoxy-2'-fluoro
  misc_feature (17)..(19): 2'-O-methyl
  misc_feature (20)..(21): phosphorothioate linkage
uagugguccaucaauugggtt

SEQ ID NO: 4959 - DNA, 21 bp, Artificial Sequence
  synthetic
  misc_feature (1)..(19): ribonucleotides
  misc_feature (1)..(1): 2'-O-methyl
  misc_feature (2)..(2): 2'-deoxy-2'-fluoro
  misc_feature (3)..(3): 2'-O-methyl
  misc_feature (4)..(5): 2'-deoxy-2'-fluoro
  misc_feature (6)..(6): 2'-O-methyl
  misc_feature (7)..(12): 2'-deoxy-2'-fluoro
  misc_feature (13)..(13): 2'-O-methyl
  misc_feature (14)..(15): 2'-deoxy-2'-fluoro
  misc_feature (16)..(16): 2'-O-methyl
  misc_feature (17)..(18): 2'-deoxy-2'-fluoro
  misc_feature (19)..(19): 2'-O-methyl
  misc_feature (20)..(21): phosphorothioate linkage
auguuguucuuuaucacugtt

SEQ ID NO: 4960 - DNA, 21 bp, Artificial Sequence
  synthetic
  misc_feature (1)..(19): ribonucleotides
  misc_feature (1)..(2): 2'-deoxy-2'-fluoro
  misc_feature (3)..(4): 2'-O-methyl
  misc_feature (5)..(5): 2'-deoxy-2'-fluoro
  misc_feature (6)..(6): 2'-O-methyl
  misc_feature (7)..(7): 2'-deoxy-2'-fluoro
  misc_feature (8)..(8): 2'-O-methyl
  misc_feature (9)..(16): 2'-deoxy-2'-fluoro
  misc_feature (17)..(17): 2'-O-methyl
  misc_feature (18)..(19): 2'-deoxy-2'-fluoro
  misc_feature (20)..(21): phosphorothioate linkage
uugguguauuucuuuugcctt

SEQ ID NO: 4961 - DNA, 21 bp, Artificial Sequence
  synthetic
  misc_feature (1)..(19): ribonucleotides
  misc_feature (1)..(4): 2'-O-methyl
  misc_feature (5)..(9): 2'-deoxy-2'-fluoro
  misc_feature (10)..(10): 2'-O-methyl
  misc_feature (11)..(11): 2'-deoxy-2'-fluoro
  misc_feature (12)..(13): 2'-O-methyl
  misc_feature (14)..(14): 2'-deoxy-2'-fluoro
  misc_feature (15)..(15): 2'-O-methyl
  misc_feature (16)..(17): 2'-deoxy-2'-fluoro
  misc_feature (18)..(19): 2'-O-methyl
  misc_feature (20)..(21): phosphorothioate linkage
aaaacuucuaugguguuggtt

SEQ ID NO: 4962 - DNA, 21 bp, Artificial Sequence
  synthetic
  misc_feature (1)..(19): ribonucleotides
  misc_feature (1)..(1): 2'-O-methyl
  misc_feature (2)..(5): 2'-deoxy-2'-fluoro
  misc_feature (6)..(6): 2'-O-methyl
  misc_feature (7)..(7): 2'-deoxy-2'-fluoro
  misc_feature (8)..(8): 2'-O-methyl
  misc_feature (9)..(13): 2'-deoxy-2'-fluoro
  misc_feature (14)..(15): 2'-O-methyl
  misc_feature (16)..(17): 2'-deoxy-2'-fluoro
  misc_feature (18)..(19): 2'-O-methyl
  misc_feature (20)..(21): phosphorothioate linkage
auuccauacuuuuggcuggtt

SEQ ID NO: 4963 - DNA, 21 bp, Artificial Sequence
  synthetic
  misc_feature (1)..(19): ribonucleotides
  misc_feature (1)..(2): 2'-deoxy-2'-fluoro
  misc_feature (3)..(4): 2'-O-methyl
  misc_feature (5)..(5): 2'-deoxy-2'-fluoro
  misc_feature (6)..(6): 2'-O-methyl
  misc_feature (7)..(7): 2'-deoxy-2'-fluoro
  misc_feature (8)..(8): 2'-O-methyl
  misc_feature (9)..(10): 2'-deoxy-2'-fluoro
  misc_feature (11)..(13): 2'-O-methyl
  misc_feature (14)..(14): 2'-deoxy-2'-fluoro
  misc_feature (15)..(15): 2'-O-methyl
  misc_feature (16)..(16): 2'-deoxy-2'-fluoro
  misc_feature (17)..(17): 2'-O-methyl
  misc_feature (18)..(19): 2'-deoxy-2'-fluoro
  misc_feature (20)..(21): phosphorothioate linkage
uuagcauguugaacaugcctt

SEQ ID NO: 4964 - DNA, 21 bp, Artificial Sequence
  synthetic
  misc_feature (1)..(19): ribonucleotides
  misc_feature (1)..(5): 2'-deoxy-2'-fluoro
  misc_feature (6)..(7): 2'-O-methyl
  misc_feature (8)..(9): 2'-deoxy-2'-fluoro
  misc_feature (10)..(10): 2'-O-methyl
  misc_feature (11)..(11): 2'-deoxy-2'-fluoro
  misc_feature (12)..(12): 2'-O-methyl
  misc_feature (13)..(14): 2'-deoxy-2'-fluoro
  misc_feature (15)..(15): 2'-O-methyl
  misc_feature (16)..(19): 2'-deoxy-2'-fluoro
  misc_feature (20)..(21): phosphorothioate linkage
uucuuggucauguugucuctt

SEQ ID NO: 4965 - DNA, 21 bp, Artificial Sequence
  synthetic
  misc_feature (1)..(19): ribonucleotides
  misc_feature (1)..(1): 5'-3 attached deoxy abasic moiety
  misc_feature (21)..(21): 3'-3 attached deoxy abasic moiety
ggucacacaaagaacaauatt

SEQ ID NO: 4966 - DNA, 21 bp, Artificial Sequence
  synthetic
  misc_feature (1)..(19): ribonucleotides
  misc_feature (1)..(1): 5'-3 attached deoxy abasic moiety
  misc_feature (21)..(21): 3'-3 attached deoxy abasic moiety
cccaauugauggaccacuatt

SEQ ID NO: 4967 - DNA, 21 bp, Artificial Sequence
  synthetic
  misc_feature (1)..(19): ribonucleotides
  misc_feature (1)..(1): 5'-3 attached deoxy abasic moiety
  misc_feature (21)..(21): 3'-3 attached deoxy abasic moiety
cagugauaaagaacaacautt

SEQ ID NO: 4968 - DNA, 21 bp, Artificial Sequence
  synthetic
  misc_feature (1)..(19): ribonucleotides
  misc_feature (1)..(1): 5'-3 attached deoxy abasic moiety
  misc_feature (21)..(21): 3'-3 attached deoxy abasic moiety
ggcaaaagaaauacaccaatt

SEQ ID NO: 4969 - DNA, 21 bp, Artificial Sequence
  synthetic
  misc_feature (1)..(19): ribonucleotides
  misc_feature (1)..(1): 5'-3 attached deoxy abasic moiety
  misc_feature (21)..(21): 3'-3 attached deoxy abasic moiety
ccaacaccauagaaguuuutt

SEQ ID NO: 4970 - DNA, 21 bp, Artificial Sequence
  synthetic
  misc_feature (1)..(19): ribonucleotides
  misc_feature (1)..(1): 5'-3 attached deoxy abasic moiety
  misc_feature (21)..(21): 3'-3 attached deoxy abasic moiety
ccagccaaaaguauggaautt

SEQ ID NO: 4971 - DNA, 21 bp, Artificial Sequence
  synthetic
  misc_feature (1)..(19): ribonucleotides
  misc_feature (1)..(1): 5'-3 attached deoxy abasic moiety
  misc_feature (21)..(21): 3'-3 attached deoxy abasic moiety
ggcauguucaacaugcuaatt

SEQ ID NO: 4972 - DNA, 21 bp, Artificial Sequence
  synthetic
  misc_feature (1)..(19): ribonucleotides
  misc_feature (1)..(1): 5'-3 attached deoxy abasic moiety
  misc_feature (21)..(21): 3'-3 attached deoxy abasic moiety
gagacaacaugaccaagaatt

SEQ ID NO: 4973 - DNA, 21 bp, Artificial Sequence
  synthetic
  misc_feature (1)..(19): ribonucleotides
  misc_feature (20)..(21): phophorothioate linkage
uauuguucuuugugugacctt

SEQ ID NO: 4974 - DNA, 21 bp, Artificial Sequence
  synthetic
  misc_feature (1)..(19): ribonucleotides
  misc_feature (20)..(21): phophorothioate linkage
uagugguccaucaauugggtt

SEQ ID NO: 4975 - DNA, 21 bp, Artificial Sequence
  synthetic
  misc_feature (1)..(19): ribonucleotides
  misc_feature (20)..(21): phophorothioate linkage
auguuguucuuuaucacugtt

SEQ ID NO: 4976 - DNA, 21 bp, Artificial Sequence
  synthetic
  misc_feature (1)..(19): ribonucleotides
  misc_feature (20)..(21): phophorothioate linkage
uugguguauuucuuuugcctt

SEQ ID NO: 4977 - DNA, 21 bp, Artificial Sequence
  synthetic
  misc_feature (1)..(19): ribonucleotides
  misc_feature (20)..(21): phophorothioate linkage
aaaacuucuaugguguuggtt

SEQ ID NO: 4978 - DNA, 21 bp, Artificial Sequence
  synthetic
  misc_feature (1)..(19): ribonucleotides
  misc_feature (20)..(21): phophorothioate linkage
auuccauacuuuuggcuggtt

SEQ ID NO: 4979 - DNA, 21 bp, Artificial Sequence
  synthetic
  misc_feature (1)..(19): ribonucleotides
  misc_feature (20)..(21): phophorothioate linkage
uuagcauguugaacaugcctt

SEQ ID NO: 4980 - DNA, 21 bp, Artificial Sequence
  synthetic
  misc_feature (1)..(19): ribonucleotides
  misc_feature (20)..(21): phophorothioate linkage
uucuuggucauguugucuctt

SEQ ID NO: 4981 - DNA, 21 bp, Artificial Sequence
  synthetic
  misc_feature (1)..(19): ribonucleotides
  misc_feature (1)..(1): 2'-deoxy-2'-fluoro
  misc_feature (1)..(1): 5'-3 attached deoxy abasic moiety
  misc_feature (2)..(2): 2'-O-methyl
  misc_feature (3)..(4): 2'-deoxy-2'-fluoro
  misc_feature (5)..(5): 2'-O-methyl
  misc_feature (6)..(11): 2'-deoxy-2'-fluoro
  misc_feature (12)..(12): 2'-O-methyl
  misc_feature (13)..(13): 2'-deoxy-2'-fluoro
  misc_feature (14)..(14): 2'-O-methyl
  misc_feature (15)..(15): 2'-deoxy-2'-fluoro
  misc_feature (16)..(17): 2'-O-methyl
  misc_feature (18)..(19): 2'-deoxy-2'-fluoro
  misc_feature (21)..(21): 3'-3 attached deoxy abasic moiety
uauuguucuuugugugacctt

SEQ ID NO: 4982 - DNA, 21 bp, Artificial Sequence
  synthetic
  misc_feature (1)..(19): ribonucleotides
  misc_feature (1)..(1): 2'-deoxy-2'-fluoro
  misc_feature (1)..(1): 5'-3 attached deoxy abasic moiety
  misc_feature (2)..(3): 2'-O-methyl
  misc_feature (4)..(4): 2'-deoxy-2'-fluoro
  misc_feature (5)..(6): 2'-O-methyl
  misc_feature (7)..(9): 2'-deoxy-2'-fluoro
  misc_feature (10)..(10): 2'-O-methyl
  misc_feature (11)..(12): 2'-deoxy-2'-fluoro
  misc_feature (13)..(14): 2'-O-methyl
  misc_feature (15)..(16): 2'-deoxy-2'-fluoro
  misc_feature (17)..(19): 2'-O-methyl
  misc_feature (21)..(21): 3'-3 attached deoxy abasic moiety
uagugguccaucaauugggtt

SEQ ID NO: 4983 - DNA, 21 bp, Artificial Sequence
  synthetic
  misc_feature (1)..(19): ribonucleotides
  misc_feature (1)..(1): 2'-O-methyl
  misc_feature (1)..(1): 5'-3 attached deoxy abasic moiety
  misc_feature (2)..(2): 2'-deoxy-2'-fluoro
  misc_feature (3)..(3): 2'-O-methyl
  misc_feature (4)..(5): 2'-deoxy-2'-fluoro
  misc_feature (6)..(6): 2'-O-methyl
  misc_feature (7)..(12): 2'-deoxy-2'-fluoro
  misc_feature (13)..(13): 2'-O-methyl
  misc_feature (14)..(15): 2'-deoxy-2'-fluoro
  misc_feature (16)..(16): 2'-O-methyl
  misc_feature (17)..(18): 2'-deoxy-2'-fluoro
  misc_feature (19)..(19): 2'-O-methyl
  misc_feature (21)..(21): 3'-3 attached deoxy abasic moiety
auguuguucuuuaucacugtt

SEQ ID NO: 4984 - DNA, 21 bp, Artificial Sequence
  synthetic
  misc_feature (1)..(19): ribonucleotides
  misc_feature (1)..(2): 2'-deoxy-2'-fluoro
  misc_feature (1)..(1): 5'-3 attached deoxy abasic moiety
  misc_feature (3)..(4): 2'-O-methyl
  misc_feature (5)..(5): 2'-deoxy-2'-fluoro
  misc_feature (6)..(6): 2'-O-methyl
  misc_feature (7)..(7): 2'-deoxy-2'-fluoro
  misc_feature (8)..(8): 2'-O-methyl
  misc_feature (9)..(16): 2'-deoxy-2'-fluoro
  misc_feature (17)..(17): 2'-O-methyl
  misc_feature (18)..(19): 2'-deoxy-2'-fluoro
  misc_feature (21)..(21): 3'-3 attached deoxy abasic moiety
uugguguauuucuuuugcctt

SEQ ID NO: 4985 - DNA, 21 bp, Artificial Sequence
  synthetic
  misc_feature (1)..(19): ribonucleotides
  misc_feature (1)..(4): 2'-O-methyl
  misc_feature (1)..(1): 5'-3 attached deoxy abasic moiety
  misc_feature (5)..(9): 2'-deoxy-2'-fluoro
  misc_feature (10)..(10): 2'-O-methyl
  misc_feature (11)..(11): 2'-deoxy-2'-fluoro
  misc_feature (12)..(13): 2'-O-methyl
  misc_feature (14)..(14): 2'-deoxy-2'-fluoro
  misc_feature (15)..(15): 2'-O-methyl
  misc_feature (16)..(17): 2'-deoxy-2'-fluoro
  misc_feature (18)..(19): 2'-O-methyl
  misc_feature (21)..(21): 3'-3 attached deoxy abasic moiety
aaaacuucuaugguguuggtt

SEQ ID NO: 4986 - DNA, 21 bp, Artificial Sequence
  synthetic
  misc_feature (1)..(19): ribonucleotides
  misc_feature (1)..(1): 2'-O-methyl
  misc_feature (1)..(1): 5'-3 attached deoxy abasic moiety
  misc_feature (2)..(5): 2'-deoxy-2'-fluoro
  misc_feature (6)..(6): 2'-O-methyl
  misc_feature (7)..(7): 2'-deoxy-2'-fluoro
  misc_feature (8)..(8): 2'-O-methyl
  misc_feature (9)..(13): 2'-deoxy-2'-fluoro
  misc_feature (14)..(15): 2'-O-methyl
  misc_feature (16)..(17): 2'-deoxy-2'-fluoro
  misc_feature (18)..(19): 2'-O-methyl
  misc_feature (21)..(21): 3'-3 attached deoxy abasic moiety
auuccauacuuuuggcuggtt

SEQ ID NO: 4987 - DNA, 21 bp, Artificial Sequence
  synthetic
  misc_feature (1)..(19): ribonucleotides
  misc_feature (1)..(2): 2'-deoxy-2'-fluoro
  misc_feature (1)..(1): 5'-3 attached deoxy abasic moiety
  misc_feature (3)..(4): 2'-O-methyl
  misc_feature (5)..(5): 2'-deoxy-2'-fluoro
  misc_feature (6)..(6): 2'-O-methyl
  misc_feature (7)..(7): 2'-deoxy-2'-fluoro
  misc_feature (8)..(8): 2'-O-methyl
  misc_feature (9)..(10): 2'-deoxy-2'-fluoro
  misc_feature (11)..(13): 2'-O-methyl
  misc_feature (14)..(14): 2'-deoxy-2'-fluoro
  misc_feature (15)..(15): 2'-O-methyl
  misc_feature (16)..(16): 2'-deoxy-2'-fluoro
  misc_feature (17)..(17): 2'-O-methyl
  misc_feature (18)..(19): 2'-deoxy-2'-fluoro
  misc_feature (21)..(21): 3'-3 attached deoxy abasic moiety
uuagcauguugaacaugcctt

SEQ ID NO: 4988 - DNA, 21 bp, Artificial Sequence
  synthetic
  misc_feature (1)..(19): ribonucleotides
  misc_feature (1)..(5): 2'-deoxy-2'-fluoro
  misc_feature (1)..(1): 5'-3 attached deoxy abasic moiety
  misc_feature (6)..(7): 2'-O-methyl
  misc_feature (8)..(9): 2'-deoxy-2'-fluoro
  misc_feature (10)..(10): 2'-O-methyl
  misc_feature (11)..(11): 2'-deoxy-2'-fluoro
  misc_feature (12)..(12): 2'-O-methyl
  misc_feature (13)..(14): 2'-deoxy-2'-fluoro
  misc_feature (15)..(15): 2'-O-methyl
  misc_feature (16)..(19): 2'-deoxy-2'-fluoro
  misc_feature (21)..(21): 3'-3 attached deoxy abasic moiety
uucuuggucauguugucuctt

SEQ ID NO: 4989 - DNA, 21 bp, Artificial Sequence
  synthetic
  misc_feature (1)..(19): ribonucleotides
  misc_feature (21)..(21): 3'-3 attached deoxy abasic moiety
uauuguucuuugugugacctt

SEQ ID NO: 4990 - DNA, 21 bp, Artificial Sequence
  synthetic
  misc_feature (1)..(19): ribonucleotides
  misc_feature (21)..(21): 3'-3 attached deoxy abasic moiety
uagugguccaucaauugggtt

SEQ ID NO: 4991 - DNA, 21 bp, Artificial Sequence
  synthetic
  misc_feature (1)..(19): ribonucleotides
  misc_feature (21)..(21): 3'-3 attached deoxy abasic moiety
auguuguucuuuaucacugtt

SEQ ID NO: 4992 - DNA, 21 bp, Artificial Sequence
  synthetic
  misc_feature (1)..(19): ribonucleotides
  misc_feature (21)..(21): 3'-3 attached deoxy abasic moiety
uugguguauuucuuuugcctt

SEQ ID NO: 4993 - DNA, 21 bp, Artificial Sequence
  synthetic
  misc_feature (1)..(19): ribonucleotides
  misc_feature (21)..(21): 3'-3 attached deoxy abasic moiety
aaaacuucuaugguguuggtt

SEQ ID NO: 4994 - DNA, 21 bp, Artificial Sequence
  synthetic
  misc_feature (1)..(19): ribonucleotides
  misc_feature (21)..(21): 3'-3 attached deoxy abasic moiety
auuccauacuuuuggcuggtt

SEQ ID NO: 4995 - DNA, 21 bp, Artificial Sequence
  synthetic
  misc_feature (1)..(19): ribonucleotides
  misc_feature (21)..(21): 3'-3 attached deoxy abasic moiety
uuagcauguugaacaugcctt

SEQ ID NO: 4996 - DNA, 21 bp, Artificial Sequence
  synthetic
  misc_feature (1)..(19): ribonucleotides
  misc_feature (21)..(21): 3'-3 attached deoxy abasic moiety
uucuuggucauguugucuctt

SEQ ID NO: 4997 - DNA, 21 bp, Artificial Sequence
  synthetic
  misc_feature (1)..(19): ribonucleotides
  misc_feature (4)..(4): 2'-deoxy-2'-fluoro
  misc_feature (5)..(5): 2'-O-methyl
  misc_feature (6)..(11): 2'-deoxy-2'-fluoro
  misc_feature (12)..(12): 2'-O-methyl
  misc_feature (13)..(13): 2'-deoxy-2'-fluoro
  misc_feature (14)..(14): 2'-O-methyl
  misc_feature (15)..(15): 2'-deoxy-2'-fluoro
  misc_feature (16)..(17): 2'-O-methyl
  misc_feature (18)..(19): 2'-deoxy-2'-fluoro
  misc_feature (20)..(21): phosphorothoiate linkage
uauuguucuuugugugacctt

SEQ ID NO: 4998 - DNA, 21 bp, Artificial Sequence
  synthetic
  misc_feature (1)..(19): ribonucleotides
  misc_feature (4)..(4): 2'-deoxy-2'-fluoro
  misc_feature (5)..(6): 2'-O-methyl
  misc_feature (7)..(9): 2'-deoxy-2'-fluoro
  misc_feature (10)..(10): 2'-O-methyl
  misc_feature (11)..(12): 2'-deoxy-2'-fluoro
  misc_feature (13)..(14): 2'-O-methyl
  misc_feature (15)..(16): 2'-deoxy-2'-fluoro
  misc_feature (17)..(19): 2'-O-methyl
  misc_feature (20)..(21): phosphorothioate linkage
uagugguccaucaauugggtt

SEQ ID NO: 4999 - DNA, 21 bp, Artificial Sequence
  synthetic
  misc_feature (1)..(19): ribonucleotides
  misc_feature (4)..(5): 2'-deoxy-2'-fluoro
  misc_feature (6)..(6): 2'-O-methyl
  misc_feature (7)..(12): 2'-deoxy-2'-fluoro
  misc_feature (13)..(13): 2'-O-methyl
  misc_feature (14)..(15): 2'-deoxy-2'-fluoro
  misc_feature (16)..(16): 2'-O-methyl
  misc_feature (17)..(18): 2'-deoxy-2'-fluoro
  misc_feature (19)..(19): 2'-O-methyl
  misc_feature (20)..(21): phosphorothioate linkage
auguuguucuuuaucacugtt

SEQ ID NO: 5000 - DNA, 21 bp, Artificial Sequence
  synthetic
  misc_feature (1)..(19): ribonucleotides
  misc_feature (4)..(4): 2'-O-methyl
  misc_feature (5)..(5): 2'-deoxy-2'-fluoro
  misc_feature (6)..(6): 2'-O-methyl
  misc_feature (7)..(7): 2'-deoxy-2'-fluoro
  misc_feature (8)..(8): 2'-O-methyl
  misc_feature (9)..(16): 2'-deoxy-2'-fluoro
  misc_feature (17)..(17): 2'-O-methyl
  misc_feature (18)..(19): 2'-deoxy-2'-fluoro
  misc_feature (20)..(21): phosphorothioate linkage
uugguguauuucuuuugcctt

SEQ ID NO: 5001 - DNA, 21 bp, Artificial Sequence
  synthetic
  misc_feature (1)..(19): ribonucleotides
  misc_feature (4)..(4): 2'-O-methyl
  misc_feature (5)..(9): 2'-deoxy-2'-fluoro
  misc_feature (10)..(10): 2'-O-methyl
  misc_feature (11)..(11): 2'-deoxy-2'-fluoro
  misc_feature (12)..(13): 2'-O-methyl
  misc_feature (14)..(14): 2'-deoxy-2'-fluoro
  misc_feature (15)..(15): 2'-O-methyl
  misc_feature (16)..(17): 2'-deoxy-2'-fluoro
  misc_feature (18)..(19): 2'-O-methyl
  misc_feature (20)..(21): phosphorothioate linkage
aaaacuucuaugguguuggtt

SEQ ID NO: 5002 - DNA, 21 bp, Artificial Sequence
  synthetic
  misc_feature (1)..(19): ribonucleotides
  misc_feature (4)..(5): 2'-deoxy-2'-fluoro
  misc_feature (6)..(6): 2'-O-methyl
  misc_feature (7)..(7): 2'-deoxy-2'-fluoro
  misc_feature (8)..(8): 2'-O-methyl
  misc_feature (9)..(13): 2'-deoxy-2'-fluoro
  misc_feature (14)..(15): 2'-O-methyl
  misc_feature (16)..(17): 2'-deoxy-2'-fluoro
  misc_feature (18)..(19): 2'-O-methyl
  misc_feature (20)..(21): phosphorothioate linkage
auuccauacuuuuggcuggtt

SEQ ID NO: 5003 - DNA, 21 bp, Artificial Sequence
  synthetic
  misc_feature (1)..(19): ribonucleotides
  misc_feature (4)..(4): 2'-O-methyl
  misc_feature (5)..(5): 2'-deoxy-2'-fluoro
  misc_feature (6)..(6): 2'-O-methyl
  misc_feature (7)..(7): 2'-deoxy-2'-fluoro
  misc_feature (8)..(8): 2'-O-methyl
  misc_feature (9)..(10): 2'-deoxy-2'-fluoro
  misc_feature (11)..(13): 2'-O-methyl
  misc_feature (14)..(14): 2'-deoxy-2'-fluoro
  misc_feature (15)..(15): 2'-O-methyl
  misc_feature (16)..(16): 2'-deoxy-2'-fluoro
  misc_feature (17)..(17): 2'-O-methyl
  misc_feature (18)..(19): 2'-deoxy-2'-fluoro
  misc_feature (20)..(21): phosphorothioate linkage
uuagcauguugaacaugcctt

SEQ ID NO: 5004 - DNA, 21 bp, Artificial Sequence
  synthetic
  misc_feature (1)..(19): ribonucleotides
  misc_feature (4)..(5): 2'-deoxy-2'-fluoro
  misc_feature (6)..(7): 2'-O-methyl
  misc_feature (8)..(9): 2'-deoxy-2'-fluoro
  misc_feature (10)..(10): 2'-O-methyl
  misc_feature (11)..(11): 2'-deoxy-2'-fluoro
  misc_feature (12)..(12): 2'-O-methyl
  misc_feature (13)..(14): 2'-deoxy-2'-fluoro
  misc_feature (15)..(15): 2'-O-methyl
  misc_feature (16)..(19): 2'-deoxy-2'-fluoro
  misc_feature (20)..(21): phosphorothioate linkage
uucuuggucauguugucuctt

SEQ ID NO: 5005 - RNA, 19 nt, Artificial Sequence
  synthetic
caaaagcagguacugauuc

SEQ ID NO: 5006 - RNA, 19 nt, Artificial Sequence
  synthetic
cgaaauggaagauuuugug

SEQ ID NO: 5007 - RNA, 19 nt, Artificial Sequence
  synthetic
aaauggaagauuuugugcg

SEQ ID NO: 5008 - RNA, 19 nt, Artificial Sequence
  synthetic
aauggaagauuuugugcga

SEQ ID NO: 5009 - RNA, 19 nt, Artificial Sequence
  synthetic
auggaagauuuugugcgac

SEQ ID NO: 5010 - RNA, 19 nt, Artificial Sequence
  synthetic
uggaagauuuugugcgaca

SEQ ID NO: 5011 - RNA, 19 nt, Artificial Sequence
  synthetic
ggaagauuuugugcgacaa

SEQ ID NO: 5012 - RNA, 19 nt, Artificial Sequence
  synthetic
gaagauuuugugcgacaau

SEQ ID NO: 5013 - RNA, 19 nt, Artificial Sequence
  synthetic
aagauuuugugcgacaaug

SEQ ID NO: 5014 - RNA, 19 nt, Artificial Sequence
  synthetic
agauuuugugcgacaaugc

SEQ ID NO: 5015 - RNA, 19 nt, Artificial Sequence
  synthetic
gauuuugugcgacaaugcu

SEQ ID NO: 5016 - RNA, 19 nt, Artificial Sequence
  synthetic
auuuugugcgacaaugcuu

SEQ ID NO: 5017 - RNA, 19 nt, Artificial Sequence
  synthetic
uuuugugcgacaaugcuuc

SEQ ID NO: 5018 - RNA, 19 nt, Artificial Sequence
  synthetic
uuugugcgacaaugcuuca

SEQ ID NO: 5019 - RNA, 19 nt, Artificial Sequence
  synthetic
uugugcgacaaugcuucaa

SEQ ID NO: 5020 - RNA, 19 nt, Artificial Sequence
  synthetic
ugugcgacaaugcuucaac

SEQ ID NO: 5021 - RNA, 19 nt, Artificial Sequence
  synthetic
gugcgacaaugcuucaacc

SEQ ID NO: 5022 - RNA, 19 nt, Artificial Sequence
  synthetic
ugcgacaaugcuucaaccc

SEQ ID NO: 5023 - RNA, 19 nt, Artificial Sequence
  synthetic
gcgacaaugcuucaacccg

SEQ ID NO: 5024 - RNA, 19 nt, Artificial Sequence
  synthetic
cgacaaugcuucaacccga

SEQ ID NO: 5025 - RNA, 19 nt, Artificial Sequence
  synthetic
gacaaugcuucaacccgau

SEQ ID NO: 5026 - RNA, 19 nt, Artificial Sequence
  synthetic
acaaugcuucaacccgaug

SEQ ID NO: 5027 - RNA, 19 nt, Artificial Sequence
  synthetic
caaugcuucaacccgauga

SEQ ID NO: 5028 - RNA, 19 nt, Artificial Sequence
  synthetic
aaugcuucaacccgaugau

SEQ ID NO: 5029 - RNA, 19 nt, Artificial Sequence
  synthetic
augcuucaacccgaugauu

SEQ ID NO: 5030 - RNA, 19 nt, Artificial Sequence
  synthetic
ugcuucaacccgaugauug

SEQ ID NO: 5031 - RNA, 19 nt, Artificial Sequence
  synthetic
gcuucaacccgaugauugu

SEQ ID NO: 5032 - RNA, 19 nt, Artificial Sequence
  synthetic
cuucaacccgaugauuguc

SEQ ID NO: 5033 - RNA, 19 nt, Artificial Sequence
  synthetic
uucaacccgaugauugucg

SEQ ID NO: 5034 - RNA, 19 nt, Artificial Sequence
  synthetic
ucaacccgaugauugucga

SEQ ID NO: 5035 - RNA, 19 nt, Artificial Sequence
  synthetic
caacccgaugauugucgaa

SEQ ID NO: 5036 - RNA, 19 nt, Artificial Sequence
  synthetic
aacccgaugauugucgaac

SEQ ID NO: 5037 - RNA, 19 nt, Artificial Sequence
  synthetic
acccgaugauugucgaacu

SEQ ID NO: 5038 - RNA, 19 nt, Artificial Sequence
  synthetic
cccgaugauugucgaacuu

SEQ ID NO: 5039 - RNA, 19 nt, Artificial Sequence
  synthetic
ccgaugauugucgaacuug

SEQ ID NO: 5040 - RNA, 19 nt, Artificial Sequence
  synthetic
cgaugauugucgaacuugc

SEQ ID NO: 5041 - RNA, 19 nt, Artificial Sequence
  synthetic
gaugauugucgaacuugca

SEQ ID NO: 5042 - RNA, 19 nt, Artificial Sequence
  synthetic
augauugucgaacuugcag

SEQ ID NO: 5043 - RNA, 19 nt, Artificial Sequence
  synthetic
ugauugucgaacuugcaga

SEQ ID NO: 5044 - RNA, 19 nt, Artificial Sequence
  synthetic
gauugucgaacuugcagaa

SEQ ID NO: 5045 - RNA, 19 nt, Artificial Sequence
  synthetic
auugucgaacuugcagaaa

SEQ ID NO: 5046 - RNA, 19 nt, Artificial Sequence
  synthetic
uugucgaacuugcagaaaa

SEQ ID NO: 5047 - RNA, 19 nt, Artificial Sequence
  synthetic
ugucgaacuugcagaaaaa

SEQ ID NO: 5048 - RNA, 19 nt, Artificial Sequence
  synthetic
gucgaacuugcagaaaaag

SEQ ID NO: 5049 - RNA, 19 nt, Artificial Sequence
  synthetic
ucgaacuugcagaaaaagc

SEQ ID NO: 5050 - RNA, 19 nt, Artificial Sequence
  synthetic
cgaacuugcagaaaaagca

SEQ ID NO: 5051 - RNA, 19 nt, Artificial Sequence
  synthetic
gaacuugcagaaaaagcaa

SEQ ID NO: 5052 - RNA, 19 nt, Artificial Sequence
  synthetic
aacuugcagaaaaagcaau

SEQ ID NO: 5053 - RNA, 19 nt, Artificial Sequence
  synthetic
acuugcagaaaaagcaaug

SEQ ID NO: 5054 - RNA, 19 nt, Artificial Sequence
  synthetic
cuugcagaaaaagcaauga

SEQ ID NO: 5055 - RNA, 19 nt, Artificial Sequence
  synthetic
uugcagaaaaagcaaugaa

SEQ ID NO: 5056 - RNA, 19 nt, Artificial Sequence
  synthetic
ugcagaaaaagcaaugaaa

SEQ ID NO: 5057 - RNA, 19 nt, Artificial Sequence
  synthetic
gcagaaaaagcaaugaaag

SEQ ID NO: 5058 - RNA, 19 nt, Artificial Sequence
  synthetic
cagaaaaagcaaugaaaga

SEQ ID NO: 5059 - RNA, 19 nt, Artificial Sequence
  synthetic
agaaaaagcaaugaaagag

SEQ ID NO: 5060 - RNA, 19 nt, Artificial Sequence
  synthetic
gaaaaagcaaugaaagagu

SEQ ID NO: 5061 - RNA, 19 nt, Artificial Sequence
  synthetic
aaaaagcaaugaaagagua

SEQ ID NO: 5062 - RNA, 19 nt, Artificial Sequence
  synthetic
aaaagcaaugaaagaguau

SEQ ID NO: 5063 - RNA, 19 nt, Artificial Sequence
  synthetic
aaagcaaugaaagaguaug

SEQ ID NO: 5064 - RNA, 19 nt, Artificial Sequence
  synthetic
aagcaaugaaagaguaugg

SEQ ID NO: 5065 - RNA, 19 nt, Artificial Sequence
  synthetic
agcaaugaaagaguaugga

SEQ ID NO: 5066 - RNA, 19 nt, Artificial Sequence
  synthetic
gcaaugaaagaguauggag

SEQ ID NO: 5067 - RNA, 19 nt, Artificial Sequence
  synthetic
caaugaaagaguauggaga

SEQ ID NO: 5068 - RNA, 19 nt, Artificial Sequence
  synthetic
aaugaaagaguauggagag

SEQ ID NO: 5069 - RNA, 19 nt, Artificial Sequence
  synthetic
guauggagaggaucugaaa

SEQ ID NO: 5070 - RNA, 19 nt, Artificial Sequence
  synthetic
aaaauugaaacaaacaaau

SEQ ID NO: 5071 - RNA, 19 nt, Artificial Sequence
  synthetic
aaauugaaacaaacaaauu

SEQ ID NO: 5072 - RNA, 19 nt, Artificial Sequence
  synthetic
aauugaaacaaacaaauuu

SEQ ID NO: 5073 - RNA, 19 nt, Artificial Sequence
  synthetic
auugaaacaaacaaauuug

SEQ ID NO: 5074 - RNA, 19 nt, Artificial Sequence
  synthetic
uugaaacaaacaaauuugc

SEQ ID NO: 5075 - RNA, 19 nt, Artificial Sequence
  synthetic
ugaaacaaacaaauuugca

SEQ ID NO: 5076 - RNA, 19 nt, Artificial Sequence
  synthetic
gaaacaaacaaauuugcag

SEQ ID NO: 5077 - RNA, 19 nt, Artificial Sequence
  synthetic
aaacaaacaaauuugcagc

SEQ ID NO: 5078 - RNA, 19 nt, Artificial Sequence
  synthetic
aacaaacaaauuugcagca

SEQ ID NO: 5079 - RNA, 19 nt, Artificial Sequence
  synthetic
acaaacaaauuugcagcaa

SEQ ID NO: 5080 - RNA, 19 nt, Artificial Sequence
  synthetic
caaacaaauuugcagcaau

SEQ ID NO: 5081 - RNA, 19 nt, Artificial Sequence
  synthetic
aaacaaauuugcagcaaua

SEQ ID NO: 5082 - RNA, 19 nt, Artificial Sequence
  synthetic
aacaaauuugcagcaauau

SEQ ID NO: 5083 - RNA, 19 nt, Artificial Sequence
  synthetic
acaaauuugcagcaauaug

SEQ ID NO: 5084 - RNA, 19 nt, Artificial Sequence
  synthetic
caaauuugcagcaauaugc

SEQ ID NO: 5085 - RNA, 19 nt, Artificial Sequence
  synthetic
aaauuugcagcaauaugca

SEQ ID NO: 5086 - RNA, 19 nt, Artificial Sequence
  synthetic
aauuugcagcaauaugcac

SEQ ID NO: 5087 - RNA, 19 nt, Artificial Sequence
  synthetic
ugcagcaauaugcacucac

SEQ ID NO: 5088 - RNA, 19 nt, Artificial Sequence
  synthetic
cuuggagguauguuucaug

SEQ ID NO: 5089 - RNA, 19 nt, Artificial Sequence
  synthetic
uggagguauguuucaugua

SEQ ID NO: 5090 - RNA, 19 nt, Artificial Sequence
  synthetic
ggagguauguuucauguau

SEQ ID NO: 5091 - RNA, 19 nt, Artificial Sequence
  synthetic
gagguauguuucauguauu

SEQ ID NO: 5092 - RNA, 19 nt, Artificial Sequence
  synthetic
agguauguuucauguauuc

SEQ ID NO: 5093 - RNA, 19 nt, Artificial Sequence
  synthetic
gguauguuucauguauuca

SEQ ID NO: 5094 - RNA, 19 nt, Artificial Sequence
  synthetic
guauguuucauguauucag

SEQ ID NO: 5095 - RNA, 19 nt, Artificial Sequence
  synthetic
uauguuucauguauucaga

SEQ ID NO: 5096 - RNA, 19 nt, Artificial Sequence
  synthetic
auguuucauguauucagau

SEQ ID NO: 5097 - RNA, 19 nt, Artificial Sequence
  synthetic
uguuucauguauucagauu

SEQ ID NO: 5098 - RNA, 19 nt, Artificial Sequence
  synthetic
guuucauguauucagauuu

SEQ ID NO: 5099 - RNA, 19 nt, Artificial Sequence
  synthetic
uuucauguauucagauuuu

SEQ ID NO: 5100 - RNA, 19 nt, Artificial Sequence
  synthetic
uucauguauucagauuuuc

SEQ ID NO: 5101 - RNA, 19 nt, Artificial Sequence
  synthetic
ucauguauucagauuuuca

SEQ ID NO: 5102 - RNA, 19 nt, Artificial Sequence
  synthetic
cauguauucagauuuucau

SEQ ID NO: 5103 - RNA, 19 nt, Artificial Sequence
  synthetic
auguauucagauuuucauu

SEQ ID NO: 5104 - RNA, 19 nt, Artificial Sequence
  synthetic
uguauucagauuuucauuu

SEQ ID NO: 5105 - RNA, 19 nt, Artificial Sequence
  synthetic
guauucagauuuucauuuc

SEQ ID NO: 5106 - RNA, 19 nt, Artificial Sequence
  synthetic
uauucagauuuucauuuca

SEQ ID NO: 5107 - RNA, 19 nt, Artificial Sequence
  synthetic
auucagauuuucauuucau

SEQ ID NO: 5108 - RNA, 19 nt, Artificial Sequence
  synthetic
uucagauuuucauuucauc

SEQ ID NO: 5109 - RNA, 19 nt, Artificial Sequence
  synthetic
ucagauuuucauuucauca

SEQ ID NO: 5110 - RNA, 19 nt, Artificial Sequence
  synthetic
cagauuuucauuucaucaa

SEQ ID NO: 5111 - RNA, 19 nt, Artificial Sequence
  synthetic
agauuuucauuucaucaau

SEQ ID NO: 5112 - RNA, 19 nt, Artificial Sequence
  synthetic
gauuuucauuucaucaaug

SEQ ID NO: 5113 - RNA, 19 nt, Artificial Sequence
  synthetic
auuuucauuucaucaauga

SEQ ID NO: 5114 - RNA, 19 nt, Artificial Sequence
  synthetic
uuuucauuucaucaaugaa

SEQ ID NO: 5115 - RNA, 19 nt, Artificial Sequence
  synthetic
uuucauuucaucaaugaac

SEQ ID NO: 5116 - RNA, 19 nt, Artificial Sequence
  synthetic
uucauuucaucaaugaaca

SEQ ID NO: 5117 - RNA, 19 nt, Artificial Sequence
  synthetic
ucauuucaucaaugaacaa

SEQ ID NO: 5118 - RNA, 19 nt, Artificial Sequence
  synthetic
cauuucaucaaugaacaag

SEQ ID NO: 5119 - RNA, 19 nt, Artificial Sequence
  synthetic
auuucaucaaugaacaagg

SEQ ID NO: 5120 - RNA, 19 nt, Artificial Sequence
  synthetic
uuucaucaaugaacaaggc

SEQ ID NO: 5121 - RNA, 19 nt, Artificial Sequence
  synthetic
uucaucaaugaacaaggcg

SEQ ID NO: 5122 - RNA, 19 nt, Artificial Sequence
  synthetic
ucaucaaugaacaaggcga

SEQ ID NO: 5123 - RNA, 19 nt, Artificial Sequence
  synthetic
caucaaugaacaaggcgaa

SEQ ID NO: 5124 - RNA, 19 nt, Artificial Sequence
  synthetic
aucaaugaacaaggcgaau

SEQ ID NO: 5125 - RNA, 19 nt, Artificial Sequence
  synthetic
ucaaugaacaaggcgaauc

SEQ ID NO: 5126 - RNA, 19 nt, Artificial Sequence
  synthetic
caaugaacaaggcgaauca

SEQ ID NO: 5127 - RNA, 19 nt, Artificial Sequence
  synthetic
aaugaacaaggcgaaucaa

SEQ ID NO: 5128 - RNA, 19 nt, Artificial Sequence
  synthetic
augaacaaggcgaaucaau

SEQ ID NO: 5129 - RNA, 19 nt, Artificial Sequence
  synthetic
ugaacaaggcgaaucaaua

SEQ ID NO: 5130 - RNA, 19 nt, Artificial Sequence
  synthetic
aucaauagugguagaacuu

SEQ ID NO: 5131 - RNA, 19 nt, Artificial Sequence
  synthetic
ugguagaacuugaugaucc

SEQ ID NO: 5132 - RNA, 19 nt, Artificial Sequence
  synthetic
gguagaacuugaugaucca

SEQ ID NO: 5133 - RNA, 19 nt, Artificial Sequence
  synthetic
guagaacuugaugauccaa

SEQ ID NO: 5134 - RNA, 19 nt, Artificial Sequence
  synthetic
uagaacuugaugauccaaa

SEQ ID NO: 5135 - RNA, 19 nt, Artificial Sequence
  synthetic
agaacuugaugauccaaau

SEQ ID NO: 5136 - RNA, 19 nt, Artificial Sequence
  synthetic
gaacuugaugauccaaaug

SEQ ID NO: 5137 - RNA, 19 nt, Artificial Sequence
  synthetic
aacuugaugauccaaaugc

SEQ ID NO: 5138 - RNA, 19 nt, Artificial Sequence
  synthetic
acuugaugauccaaaugca

SEQ ID NO: 5139 - RNA, 19 nt, Artificial Sequence
  synthetic
cuugaugauccaaaugcac

SEQ ID NO: 5140 - RNA, 19 nt, Artificial Sequence
  synthetic
uugaugauccaaaugcacu

SEQ ID NO: 5141 - RNA, 19 nt, Artificial Sequence
  synthetic
ugaugauccaaaugcacug

SEQ ID NO: 5142 - RNA, 19 nt, Artificial Sequence
  synthetic
gaugauccaaaugcacugu

SEQ ID NO: 5143 - RNA, 19 nt, Artificial Sequence
  synthetic
augauccaaaugcacuguu

SEQ ID NO: 5144 - RNA, 19 nt, Artificial Sequence
  synthetic
ugauccaaaugcacuguua

SEQ ID NO: 5145 - RNA, 19 nt, Artificial Sequence
  synthetic
gauccaaaugcacuguuaa

SEQ ID NO: 5146 - RNA, 19 nt, Artificial Sequence
  synthetic
auccaaaugcacuguuaaa

SEQ ID NO: 5147 - RNA, 19 nt, Artificial Sequence
  synthetic
uccaaaugcacuguuaaag

SEQ ID NO: 5148 - RNA, 19 nt, Artificial Sequence
  synthetic
ccaaaugcacuguuaaagc

SEQ ID NO: 5149 - RNA, 19 nt, Artificial Sequence
  synthetic
caaaugcacuguuaaagca

SEQ ID NO: 5150 - RNA, 19 nt, Artificial Sequence
  synthetic
aaaugcacuguuaaagcac

SEQ ID NO: 5151 - RNA, 19 nt, Artificial Sequence
  synthetic
aaugcacuguuaaagcaca

SEQ ID NO: 5152 - RNA, 19 nt, Artificial Sequence
  synthetic
augcacuguuaaagcacag

SEQ ID NO: 5153 - RNA, 19 nt, Artificial Sequence
  synthetic
ugcacuguuaaagcacaga

SEQ ID NO: 5154 - RNA, 19 nt, Artificial Sequence
  synthetic
gcacuguuaaagcacagau

SEQ ID NO: 5155 - RNA, 19 nt, Artificial Sequence
  synthetic
cacuguuaaagcacagauu

SEQ ID NO: 5156 - RNA, 19 nt, Artificial Sequence
  synthetic
acuguuaaagcacagauuu

SEQ ID NO: 5157 - RNA, 19 nt, Artificial Sequence
  synthetic
cuguuaaagcacagauuug

SEQ ID NO: 5158 - RNA, 19 nt, Artificial Sequence
  synthetic
uguuaaagcacagauuuga

SEQ ID NO: 5159 - RNA, 19 nt, Artificial Sequence
  synthetic
guuaaagcacagauuugaa

SEQ ID NO: 5160 - RNA, 19 nt, Artificial Sequence
  synthetic
uuaaagcacagauuugaaa

SEQ ID NO: 5161 - RNA, 19 nt, Artificial Sequence
  synthetic
uaaagcacagauuugaaau

SEQ ID NO: 5162 - RNA, 19 nt, Artificial Sequence
  synthetic
aaagcacagauuugaaaua

SEQ ID NO: 5163 - RNA, 19 nt, Artificial Sequence
  synthetic
aagcacagauuugaaauaa

SEQ ID NO: 5164 - RNA, 19 nt, Artificial Sequence
  synthetic
agcacagauuugaaauaau

SEQ ID NO: 5165 - RNA, 19 nt, Artificial Sequence
  synthetic
gcacagauuugaaauaauc

SEQ ID NO: 5166 - RNA, 19 nt, Artificial Sequence
  synthetic
cacagauuugaaauaaucg

SEQ ID NO: 5167 - RNA, 19 nt, Artificial Sequence
  synthetic
acagauuugaaauaaucga

SEQ ID NO: 5168 - RNA, 19 nt, Artificial Sequence
  synthetic
cagauuugaaauaaucgag

SEQ ID NO: 5169 - RNA, 19 nt, Artificial Sequence
  synthetic
agauuugaaauaaucgagg

SEQ ID NO: 5170 - RNA, 19 nt, Artificial Sequence
  synthetic
gauuugaaauaaucgaggg

SEQ ID NO: 5171 - RNA, 19 nt, Artificial Sequence
  synthetic
auuugaaauaaucgagggg

SEQ ID NO: 5172 - RNA, 19 nt, Artificial Sequence
  synthetic
uuugaaauaaucgagggga

SEQ ID NO: 5173 - RNA, 19 nt, Artificial Sequence
  synthetic
uugaaauaaucgaggggag

SEQ ID NO: 5174 - RNA, 19 nt, Artificial Sequence
  synthetic
ugaaauaaucgaggggaga

SEQ ID NO: 5175 - RNA, 19 nt, Artificial Sequence
  synthetic
gaaauaaucgaggggagag

SEQ ID NO: 5176 - RNA, 19 nt, Artificial Sequence
  synthetic
aaauaaucgaggggagaga

SEQ ID NO: 5177 - RNA, 19 nt, Artificial Sequence
  synthetic
aauaaucgaggggagagac

SEQ ID NO: 5178 - RNA, 19 nt, Artificial Sequence
  synthetic
auaaucgaggggagagaca

SEQ ID NO: 5179 - RNA, 19 nt, Artificial Sequence
  synthetic
uaaucgaggggagagacag

SEQ ID NO: 5180 - RNA, 19 nt, Artificial Sequence
  synthetic
aaucgaggggagagacaga

SEQ ID NO: 5181 - RNA, 19 nt, Artificial Sequence
  synthetic
aucgaggggagagacagaa

SEQ ID NO: 5182 - RNA, 19 nt, Artificial Sequence
  synthetic
ucgaggggagagacagaac

SEQ ID NO: 5183 - RNA, 19 nt, Artificial Sequence
  synthetic
cgaggggagagacagaaca

SEQ ID NO: 5184 - RNA, 19 nt, Artificial Sequence
  synthetic
gaggggagagacagaacaa

SEQ ID NO: 5185 - RNA, 19 nt, Artificial Sequence
  synthetic
aggggagagacagaacaau

SEQ ID NO: 5186 - RNA, 19 nt, Artificial Sequence
  synthetic
ggggagagacagaacaaug

SEQ ID NO: 5187 - RNA, 19 nt, Artificial Sequence
  synthetic
gggagagacagaacaaugg

SEQ ID NO: 5188 - RNA, 19 nt, Artificial Sequence
  synthetic
ggagagacagaacaauggc

SEQ ID NO: 5189 - RNA, 19 nt, Artificial Sequence
  synthetic
gagagacagaacaauggcc

SEQ ID NO: 5190 - RNA, 19 nt, Artificial Sequence
  synthetic
agagacagaacaauggccu

SEQ ID NO: 5191 - RNA, 19 nt, Artificial Sequence
  synthetic
gagacagaacaauggccug

SEQ ID NO: 5192 - RNA, 19 nt, Artificial Sequence
  synthetic
agacagaacaauggccugg

SEQ ID NO: 5193 - RNA, 19 nt, Artificial Sequence
  synthetic
gacagaacaauggccugga

SEQ ID NO: 5194 - RNA, 19 nt, Artificial Sequence
  synthetic
acagaacaauggccuggac

SEQ ID NO: 5195 - RNA, 19 nt, Artificial Sequence
  synthetic
cagaacaauggccuggaca

SEQ ID NO: 5196 - RNA, 19 nt, Artificial Sequence
  synthetic
agaacaauggccuggacag

SEQ ID NO: 5197 - RNA, 19 nt, Artificial Sequence
  synthetic
gaacaauggccuggacagu

SEQ ID NO: 5198 - RNA, 19 nt, Artificial Sequence
  synthetic
aacaauggccuggacagua

SEQ ID NO: 5199 - RNA, 19 nt, Artificial Sequence
  synthetic
acaauggccuggacaguag

SEQ ID NO: 5200 - RNA, 19 nt, Artificial Sequence
  synthetic
caauggccuggacaguagu

SEQ ID NO: 5201 - RNA, 19 nt, Artificial Sequence
  synthetic
aauggccuggacaguagua

SEQ ID NO: 5202 - RNA, 19 nt, Artificial Sequence
  synthetic
auggccuggacaguaguaa

SEQ ID NO: 5203 - RNA, 19 nt, Artificial Sequence
  synthetic
uggccuggacaguaguaaa

SEQ ID NO: 5204 - RNA, 19 nt, Artificial Sequence
  synthetic
ggccuggacaguaguaaac

SEQ ID NO: 5205 - RNA, 19 nt, Artificial Sequence
  synthetic
gccuggacaguaguaaaca

SEQ ID NO: 5206 - RNA, 19 nt, Artificial Sequence
  synthetic
ccuggacaguaguaaacag

SEQ ID NO: 5207 - RNA, 19 nt, Artificial Sequence
  synthetic
cuggacaguaguaaacagu

SEQ ID NO: 5208 - RNA, 19 nt, Artificial Sequence
  synthetic
uggacaguaguaaacagua

SEQ ID NO: 5209 - RNA, 19 nt, Artificial Sequence
  synthetic
ggacaguaguaaacaguau

SEQ ID NO: 5210 - RNA, 19 nt, Artificial Sequence
  synthetic
gacaguaguaaacaguauc

SEQ ID NO: 5211 - RNA, 19 nt, Artificial Sequence
  synthetic
acaguaguaaacaguaucu

SEQ ID NO: 5212 - RNA, 19 nt, Artificial Sequence
  synthetic
caguaguaaacaguaucug

SEQ ID NO: 5213 - RNA, 19 nt, Artificial Sequence
  synthetic
aguaguaaacaguaucugc

SEQ ID NO: 5214 - RNA, 19 nt, Artificial Sequence
  synthetic
guaguaaacaguaucugca

SEQ ID NO: 5215 - RNA, 19 nt, Artificial Sequence
  synthetic
uaguaaacaguaucugcaa

SEQ ID NO: 5216 - RNA, 19 nt, Artificial Sequence
  synthetic
aguaaacaguaucugcaac

SEQ ID NO: 5217 - RNA, 19 nt, Artificial Sequence
  synthetic
guaaacaguaucugcaaca

SEQ ID NO: 5218 - RNA, 19 nt, Artificial Sequence
  synthetic
uaaacaguaucugcaacac

SEQ ID NO: 5219 - RNA, 19 nt, Artificial Sequence
  synthetic
aaacaguaucugcaacacu

SEQ ID NO: 5220 - RNA, 19 nt, Artificial Sequence
  synthetic
aacaguaucugcaacacua

SEQ ID NO: 5221 - RNA, 19 nt, Artificial Sequence
  synthetic
acaguaucugcaacacuac

SEQ ID NO: 5222 - RNA, 19 nt, Artificial Sequence
  synthetic
caguaucugcaacacuacu

SEQ ID NO: 5223 - RNA, 19 nt, Artificial Sequence
  synthetic
aguaucugcaacacuacug

SEQ ID NO: 5224 - RNA, 19 nt, Artificial Sequence
  synthetic
guaucugcaacacuacugg

SEQ ID NO: 5225 - RNA, 19 nt, Artificial Sequence
  synthetic
uaucugcaacacuacugga

SEQ ID NO: 5226 - RNA, 19 nt, Artificial Sequence
  synthetic
aucugcaacacuacuggag

SEQ ID NO: 5227 - RNA, 19 nt, Artificial Sequence
  synthetic
ucugcaacacuacuggagc

SEQ ID NO: 5228 - RNA, 19 nt, Artificial Sequence
  synthetic
cugcaacacuacuggagcu

SEQ ID NO: 5229 - RNA, 19 nt, Artificial Sequence
  synthetic
ugcaacacuacuggagcug

SEQ ID NO: 5230 - RNA, 19 nt, Artificial Sequence
  synthetic
gcaacacuacuggagcuga

SEQ ID NO: 5231 - RNA, 19 nt, Artificial Sequence
  synthetic
caacacuacuggagcugag

SEQ ID NO: 5232 - RNA, 19 nt, Artificial Sequence
  synthetic
gaaaccgaaguuucuacca

SEQ ID NO: 5233 - RNA, 19 nt, Artificial Sequence
  synthetic
agauuuguaugauuacaag

SEQ ID NO: 5234 - RNA, 19 nt, Artificial Sequence
  synthetic
uuguaugauuacaaggaga

SEQ ID NO: 5235 - RNA, 19 nt, Artificial Sequence
  synthetic
uguaugauuacaaggagaa

SEQ ID NO: 5236 - RNA, 19 nt, Artificial Sequence
  synthetic
guaugauuacaaggagaac

SEQ ID NO: 5237 - RNA, 19 nt, Artificial Sequence
  synthetic
uaugauuacaaggagaaca

SEQ ID NO: 5238 - RNA, 19 nt, Artificial Sequence
  synthetic
augauuacaaggagaacag

SEQ ID NO: 5239 - RNA, 19 nt, Artificial Sequence
  synthetic
ugauuacaaggagaacaga

SEQ ID NO: 5240 - RNA, 19 nt, Artificial Sequence
  synthetic
gauuacaaggagaacagau

SEQ ID NO: 5241 - RNA, 19 nt, Artificial Sequence
  synthetic
auuacaaggagaacagauu

SEQ ID NO: 5242 - RNA, 19 nt, Artificial Sequence
  synthetic
uuacaaggagaacagauuc

SEQ ID NO: 5243 - RNA, 19 nt, Artificial Sequence
  synthetic
uacaaggagaacagauuca

SEQ ID NO: 5244 - RNA, 19 nt, Artificial Sequence
  synthetic
acaaggagaacagauucau

SEQ ID NO: 5245 - RNA, 19 nt, Artificial Sequence
  synthetic
caaggagaacagauucauc

SEQ ID NO: 5246 - RNA, 19 nt, Artificial Sequence
  synthetic
aaggagaacagauucaucg

SEQ ID NO: 5247 - RNA, 19 nt, Artificial Sequence
  synthetic
aggagaacagauucaucga

SEQ ID NO: 5248 - RNA, 19 nt, Artificial Sequence
  synthetic
ggagaacagauucaucgaa

SEQ ID NO: 5249 - RNA, 19 nt, Artificial Sequence
  synthetic
gagaacagauucaucgaaa

SEQ ID NO: 5250 - RNA, 19 nt, Artificial Sequence
  synthetic
agaacagauucaucgaaau

SEQ ID NO: 5251 - RNA, 19 nt, Artificial Sequence
  synthetic
gaacagauucaucgaaauu

SEQ ID NO: 5252 - RNA, 19 nt, Artificial Sequence
  synthetic
aacagauucaucgaaauug

SEQ ID NO: 5253 - RNA, 19 nt, Artificial Sequence
  synthetic
acagauucaucgaaauugg

SEQ ID NO: 5254 - RNA, 19 nt, Artificial Sequence
  synthetic
cagauucaucgaaauugga

SEQ ID NO: 5255 - RNA, 19 nt, Artificial Sequence
  synthetic
agauucaucgaaauuggag

SEQ ID NO: 5256 - RNA, 19 nt, Artificial Sequence
  synthetic
gauucaucgaaauuggagu

SEQ ID NO: 5257 - RNA, 19 nt, Artificial Sequence
  synthetic
auucaucgaaauuggagug

SEQ ID NO: 5258 - RNA, 19 nt, Artificial Sequence
  synthetic
uucaucgaaauuggaguga

SEQ ID NO: 5259 - RNA, 19 nt, Artificial Sequence
  synthetic
ucaucgaaauuggagugac

SEQ ID NO: 5260 - RNA, 19 nt, Artificial Sequence
  synthetic
caucgaaauuggagugaca

SEQ ID NO: 5261 - RNA, 19 nt, Artificial Sequence
  synthetic
aucgaaauuggagugacaa

SEQ ID NO: 5262 - RNA, 19 nt, Artificial Sequence
  synthetic
ucgaaauuggagugacaag

SEQ ID NO: 5263 - RNA, 19 nt, Artificial Sequence
  synthetic
aauuggagugacaaggaga

SEQ ID NO: 5264 - RNA, 19 nt, Artificial Sequence
  synthetic
agagaaguccacauauauu

SEQ ID NO: 5265 - RNA, 19 nt, Artificial Sequence
  synthetic
gagaaguccacauauauua

SEQ ID NO: 5266 - RNA, 19 nt, Artificial Sequence
  synthetic
agaaguccacauauauuac

SEQ ID NO: 5267 - RNA, 19 nt, Artificial Sequence
  synthetic
gaaguccacauauauuacc

SEQ ID NO: 5268 - RNA, 19 nt, Artificial Sequence
  synthetic
aaguccacauauauuaccu

SEQ ID NO: 5269 - RNA, 19 nt, Artificial Sequence
  synthetic
aguccacauauauuaccuu

SEQ ID NO: 5270 - RNA, 19 nt, Artificial Sequence
  synthetic
guccacauauauuaccuug

SEQ ID NO: 5271 - RNA, 19 nt, Artificial Sequence
  synthetic
uccacauauauuaccuuga

SEQ ID NO: 5272 - RNA, 19 nt, Artificial Sequence
  synthetic
ccacauauauuaccuugaa

SEQ ID NO: 5273 - RNA, 19 nt, Artificial Sequence
  synthetic
cacauauauuaccuugaaa

SEQ ID NO: 5274 - RNA, 19 nt, Artificial Sequence
  synthetic
acauauauuaccuugaaaa

SEQ ID NO: 5275 - RNA, 19 nt, Artificial Sequence
  synthetic
cauauauuaccuugaaaag

SEQ ID NO: 5276 - RNA, 19 nt, Artificial Sequence
  synthetic
auauauuaccuugaaaagg

SEQ ID NO: 5277 - RNA, 19 nt, Artificial Sequence
  synthetic
uauauuaccuugaaaaggc

SEQ ID NO: 5278 - RNA, 19 nt, Artificial Sequence
  synthetic
auauuaccuugaaaaggcc

SEQ ID NO: 5279 - RNA, 19 nt, Artificial Sequence
  synthetic
uauuaccuugaaaaggcca

SEQ ID NO: 5280 - RNA, 19 nt, Artificial Sequence
  synthetic
auuaccuugaaaaggccaa

SEQ ID NO: 5281 - RNA, 19 nt, Artificial Sequence
  synthetic
uuaccuugaaaaggccaau

SEQ ID NO: 5282 - RNA, 19 nt, Artificial Sequence
  synthetic
uaccuugaaaaggccaaua

SEQ ID NO: 5283 - RNA, 19 nt, Artificial Sequence
  synthetic
accuugaaaaggccaauaa

SEQ ID NO: 5284 - RNA, 19 nt, Artificial Sequence
  synthetic
ccuugaaaaggccaauaaa

SEQ ID NO: 5285 - RNA, 19 nt, Artificial Sequence
  synthetic
cuugaaaaggccaauaaaa

SEQ ID NO: 5286 - RNA, 19 nt, Artificial Sequence
  synthetic
uugaaaaggccaauaaaau

SEQ ID NO: 5287 - RNA, 19 nt, Artificial Sequence
  synthetic
ugaaaaggccaauaaaauu

SEQ ID NO: 5288 - RNA, 19 nt, Artificial Sequence
  synthetic
gaaaaggccaauaaaauua

SEQ ID NO: 5289 - RNA, 19 nt, Artificial Sequence
  synthetic
aaaaggccaauaaaauuaa

SEQ ID NO: 5290 - RNA, 19 nt, Artificial Sequence
  synthetic
aaaggccaauaaaauuaaa

SEQ ID NO: 5291 - RNA, 19 nt, Artificial Sequence
  synthetic
aaggccaauaaaauuaaau

SEQ ID NO: 5292 - RNA, 19 nt, Artificial Sequence
  synthetic
aggccaauaaaauuaaauc

SEQ ID NO: 5293 - RNA, 19 nt, Artificial Sequence
  synthetic
ggccaauaaaauuaaaucu

SEQ ID NO: 5294 - RNA, 19 nt, Artificial Sequence
  synthetic
gccaauaaaauuaaaucug

SEQ ID NO: 5295 - RNA, 19 nt, Artificial Sequence
  synthetic
ccaauaaaauuaaaucuga

SEQ ID NO: 5296 - RNA, 19 nt, Artificial Sequence
  synthetic
caauaaaauuaaaucugag

SEQ ID NO: 5297 - RNA, 19 nt, Artificial Sequence
  synthetic
aauaaaauuaaaucugaga

SEQ ID NO: 5298 - RNA, 19 nt, Artificial Sequence
  synthetic
auaaaauuaaaucugagaa

SEQ ID NO: 5299 - RNA, 19 nt, Artificial Sequence
  synthetic
aauuaaaucugagaauaca

SEQ ID NO: 5300 - RNA, 19 nt, Artificial Sequence
  synthetic
acacacauucacauuuucu

SEQ ID NO: 5301 - RNA, 19 nt, Artificial Sequence
  synthetic
cacacauucacauuuucuc

SEQ ID NO: 5302 - RNA, 19 nt, Artificial Sequence
  synthetic
acacauucacauuuucuca

SEQ ID NO: 5303 - RNA, 19 nt, Artificial Sequence
  synthetic
cacauucacauuuucucau

SEQ ID NO: 5304 - RNA, 19 nt, Artificial Sequence
  synthetic
acauucacauuuucucauu

SEQ ID NO: 5305 - RNA, 19 nt, Artificial Sequence
  synthetic
cauucacauuuucucauuc

SEQ ID NO: 5306 - RNA, 19 nt, Artificial Sequence
  synthetic
auucacauuuucucauuca

SEQ ID NO: 5307 - RNA, 19 nt, Artificial Sequence
  synthetic
uucacauuuucucauucac

SEQ ID NO: 5308 - RNA, 19 nt, Artificial Sequence
  synthetic
ucacauuuucucauucacu

SEQ ID NO: 5309 - RNA, 19 nt, Artificial Sequence
  synthetic
cacauuuucucauucacug

SEQ ID NO: 5310 - RNA, 19 nt, Artificial Sequence
  synthetic
acauuuucucauucacugg

SEQ ID NO: 5311 - RNA, 19 nt, Artificial Sequence
  synthetic
cauuuucucauucacuggg

SEQ ID NO: 5312 - RNA, 19 nt, Artificial Sequence
  synthetic
auuuucucauucacugggg

SEQ ID NO: 5313 - RNA, 19 nt, Artificial Sequence
  synthetic
uuuucucauucacugggga

SEQ ID NO: 5314 - RNA, 19 nt, Artificial Sequence
  synthetic
uuucucauucacuggggag

SEQ ID NO: 5315 - RNA, 19 nt, Artificial Sequence
  synthetic
uucucauucacuggggagg

SEQ ID NO: 5316 - RNA, 19 nt, Artificial Sequence
  synthetic
ucucauucacuggggagga

SEQ ID NO: 5317 - RNA, 19 nt, Artificial Sequence
  synthetic
cucauucacuggggaggaa

SEQ ID NO: 5318 - RNA, 19 nt, Artificial Sequence
  synthetic
ucauucacuggggaggaaa

SEQ ID NO: 5319 - RNA, 19 nt, Artificial Sequence
  synthetic
cauucacuggggaggaaau

SEQ ID NO: 5320 - RNA, 19 nt, Artificial Sequence
  synthetic
auucacuggggaggaaaug

SEQ ID NO: 5321 - RNA, 19 nt, Artificial Sequence
  synthetic
uucacuggggaggaaaugg

SEQ ID NO: 5322 - RNA, 19 nt, Artificial Sequence
  synthetic
ucacuggggaggaaauggc

SEQ ID NO: 5323 - RNA, 19 nt, Artificial Sequence
  synthetic
cacuggggaggaaauggcc

SEQ ID NO: 5324 - RNA, 19 nt, Artificial Sequence
  synthetic
acuggggaggaaauggcca

SEQ ID NO: 5325 - RNA, 19 nt, Artificial Sequence
  synthetic
cuggggaggaaauggccac

SEQ ID NO: 5326 - RNA, 19 nt, Artificial Sequence
  synthetic
uggggaggaaauggccaca

SEQ ID NO: 5327 - RNA, 19 nt, Artificial Sequence
  synthetic
ggggaggaaauggccacaa

SEQ ID NO: 5328 - RNA, 19 nt, Artificial Sequence
  synthetic
gggaggaaauggccacaaa

SEQ ID NO: 5329 - RNA, 19 nt, Artificial Sequence
  synthetic
ggaggaaauggccacaaag

SEQ ID NO: 5330 - RNA, 19 nt, Artificial Sequence
  synthetic
gaggaaauggccacaaagg

SEQ ID NO: 5331 - RNA, 19 nt, Artificial Sequence
  synthetic
aggaaauggccacaaaggc

SEQ ID NO: 5332 - RNA, 19 nt, Artificial Sequence
  synthetic
ggaaauggccacaaaggca

SEQ ID NO: 5333 - RNA, 19 nt, Artificial Sequence
  synthetic
gaaauggccacaaaggcag

SEQ ID NO: 5334 - RNA, 19 nt, Artificial Sequence
  synthetic
aaauggccacaaaggcaga

SEQ ID NO: 5335 - RNA, 19 nt, Artificial Sequence
  synthetic
aauggccacaaaggcagac

SEQ ID NO: 5336 - RNA, 19 nt, Artificial Sequence
  synthetic
auggccacaaaggcagacu

SEQ ID NO: 5337 - RNA, 19 nt, Artificial Sequence
  synthetic
uggccacaaaggcagacua

SEQ ID NO: 5338 - RNA, 19 nt, Artificial Sequence
  synthetic
ggccacaaaggcagacuac

SEQ ID NO: 5339 - RNA, 19 nt, Artificial Sequence
  synthetic
gccacaaaggcagacuaca

SEQ ID NO: 5340 - RNA, 19 nt, Artificial Sequence
  synthetic
ccacaaaggcagacuacac

SEQ ID NO: 5341 - RNA, 19 nt, Artificial Sequence
  synthetic
cacaaaggcagacuacacu

SEQ ID NO: 5342 - RNA, 19 nt, Artificial Sequence
  synthetic
acaaaggcagacuacacuc

SEQ ID NO: 5343 - RNA, 19 nt, Artificial Sequence
  synthetic
caaaggcagacuacacucu

SEQ ID NO: 5344 - RNA, 19 nt, Artificial Sequence
  synthetic
aaaggcagacuacacucuc

SEQ ID NO: 5345 - RNA, 19 nt, Artificial Sequence
  synthetic
aaggcagacuacacucucg

SEQ ID NO: 5346 - RNA, 19 nt, Artificial Sequence
  synthetic
aggcagacuacacucucga

SEQ ID NO: 5347 - RNA, 19 nt, Artificial Sequence
  synthetic
ggcagacuacacucucgac

SEQ ID NO: 5348 - RNA, 19 nt, Artificial Sequence
  synthetic
gcagacuacacucucgacg

SEQ ID NO: 5349 - RNA, 19 nt, Artificial Sequence
  synthetic
cagacuacacucucgacga

SEQ ID NO: 5350 - RNA, 19 nt, Artificial Sequence
  synthetic
agacuacacucucgacgag

SEQ ID NO: 5351 - RNA, 19 nt, Artificial Sequence
  synthetic
gacuacacucucgacgagg

SEQ ID NO: 5352 - RNA, 19 nt, Artificial Sequence
  synthetic
acuacacucucgacgagga

SEQ ID NO: 5353 - RNA, 19 nt, Artificial Sequence
  synthetic
cuacacucucgacgaggaa

SEQ ID NO: 5354 - RNA, 19 nt, Artificial Sequence
  synthetic
uacacucucgacgaggaaa

SEQ ID NO: 5355 - RNA, 19 nt, Artificial Sequence
  synthetic
acacucucgacgaggaaag

SEQ ID NO: 5356 - RNA, 19 nt, Artificial Sequence
  synthetic
cacucucgacgaggaaagc

SEQ ID NO: 5357 - RNA, 19 nt, Artificial Sequence
  synthetic
acucucgacgaggaaagca

SEQ ID NO: 5358 - RNA, 19 nt, Artificial Sequence
  synthetic
cucucgacgaggaaagcag

SEQ ID NO: 5359 - RNA, 19 nt, Artificial Sequence
  synthetic
ucucgacgaggaaagcagg

SEQ ID NO: 5360 - RNA, 19 nt, Artificial Sequence
  synthetic
cucgacgaggaaagcaggg

SEQ ID NO: 5361 - RNA, 19 nt, Artificial Sequence
  synthetic
ucgacgaggaaagcagggc

SEQ ID NO: 5362 - RNA, 19 nt, Artificial Sequence
  synthetic
cgacgaggaaagcagggcu

SEQ ID NO: 5363 - RNA, 19 nt, Artificial Sequence
  synthetic
gacgaggaaagcagggcua

SEQ ID NO: 5364 - RNA, 19 nt, Artificial Sequence
  synthetic
acgaggaaagcagggcuag

SEQ ID NO: 5365 - RNA, 19 nt, Artificial Sequence
  synthetic
cgaggaaagcagggcuagg

SEQ ID NO: 5366 - RNA, 19 nt, Artificial Sequence
  synthetic
gaggaaagcagggcuagga

SEQ ID NO: 5367 - RNA, 19 nt, Artificial Sequence
  synthetic
aggaaagcagggcuaggau

SEQ ID NO: 5368 - RNA, 19 nt, Artificial Sequence
  synthetic
ggaaagcagggcuaggauu

SEQ ID NO: 5369 - RNA, 19 nt, Artificial Sequence
  synthetic
gaaagcagggcuaggauua

SEQ ID NO: 5370 - RNA, 19 nt, Artificial Sequence
  synthetic
aaagcagggcuaggauuaa

SEQ ID NO: 5371 - RNA, 19 nt, Artificial Sequence
  synthetic
cagggcuaggauuaagacc

SEQ ID NO: 5372 - RNA, 19 nt, Artificial Sequence
  synthetic
caggcuauuuaccauaagg

SEQ ID NO: 5373 - RNA, 19 nt, Artificial Sequence
  synthetic
gcaagaaauggccaacaga

SEQ ID NO: 5374 - RNA, 19 nt, Artificial Sequence
  synthetic
caagaaauggccaacagag

SEQ ID NO: 5375 - RNA, 19 nt, Artificial Sequence
  synthetic
aagaaauggccaacagagg

SEQ ID NO: 5376 - RNA, 19 nt, Artificial Sequence
  synthetic
agaaauggccaacagaggc

SEQ ID NO: 5377 - RNA, 19 nt, Artificial Sequence
  synthetic
gaaauggccaacagaggcc

SEQ ID NO: 5378 - RNA, 19 nt, Artificial Sequence
  synthetic
aaauggccaacagaggccu

SEQ ID NO: 5379 - RNA, 19 nt, Artificial Sequence
  synthetic
aauggccaacagaggccuc

SEQ ID NO: 5380 - RNA, 19 nt, Artificial Sequence
  synthetic
auggccaacagaggccucu

SEQ ID NO: 5381 - RNA, 19 nt, Artificial Sequence
  synthetic
uggccaacagaggccucug

SEQ ID NO: 5382 - RNA, 19 nt, Artificial Sequence
  synthetic
ggccaacagaggccucugg

SEQ ID NO: 5383 - RNA, 19 nt, Artificial Sequence
  synthetic
gccaacagaggccucuggg

SEQ ID NO: 5384 - RNA, 19 nt, Artificial Sequence
  synthetic
ccaacagaggccucuggga

SEQ ID NO: 5385 - RNA, 19 nt, Artificial Sequence
  synthetic
caacagaggccucugggau

SEQ ID NO: 5386 - RNA, 19 nt, Artificial Sequence
  synthetic
aacagaggccucugggauu

SEQ ID NO: 5387 - RNA, 19 nt, Artificial Sequence
  synthetic
acagaggccucugggauuc

SEQ ID NO: 5388 - RNA, 19 nt, Artificial Sequence
  synthetic
cagaggccucugggauucc

SEQ ID NO: 5389 - RNA, 19 nt, Artificial Sequence
  synthetic
agaggccucugggauuccu

SEQ ID NO: 5390 - RNA, 19 nt, Artificial Sequence
  synthetic
gaggccucugggauuccuu

SEQ ID NO: 5391 - RNA, 19 nt, Artificial Sequence
  synthetic
aggccucugggauuccuuu

SEQ ID NO: 5392 - RNA, 19 nt, Artificial Sequence
  synthetic
ggccucugggauuccuuuc

SEQ ID NO: 5393 - RNA, 19 nt, Artificial Sequence
  synthetic
gccucugggauuccuuucg

SEQ ID NO: 5394 - RNA, 19 nt, Artificial Sequence
  synthetic
ccucugggauuccuuucgu

SEQ ID NO: 5395 - RNA, 19 nt, Artificial Sequence
  synthetic
cucugggauuccuuucguc

SEQ ID NO: 5396 - RNA, 19 nt, Artificial Sequence
  synthetic
ucugggauuccuuucguca

SEQ ID NO: 5397 - RNA, 19 nt, Artificial Sequence
  synthetic
cugggauuccuuucgucag

SEQ ID NO: 5398 - RNA, 19 nt, Artificial Sequence
  synthetic
ugggauuccuuucgucagu

SEQ ID NO: 5399 - RNA, 19 nt, Artificial Sequence
  synthetic
gggauuccuuucgucaguc

SEQ ID NO: 5400 - RNA, 19 nt, Artificial Sequence
  synthetic
ggauuccuuucgucagucc

SEQ ID NO: 5401 - RNA, 19 nt, Artificial Sequence
  synthetic
gauuccuuucgucaguccg

SEQ ID NO: 5402 - RNA, 19 nt, Artificial Sequence
  synthetic
auuccuuucgucaguccga

SEQ ID NO: 5403 - RNA, 19 nt, Artificial Sequence
  synthetic
uuccuuucgucaguccgaa

SEQ ID NO: 5404 - RNA, 19 nt, Artificial Sequence
  synthetic
uccuuucgucaguccgaaa

SEQ ID NO: 5405 - RNA, 19 nt, Artificial Sequence
  synthetic
ccuuucgucaguccgaaag

SEQ ID NO: 5406 - RNA, 19 nt, Artificial Sequence
  synthetic
cuuucgucaguccgaaaga

SEQ ID NO: 5407 - RNA, 19 nt, Artificial Sequence
  synthetic
uuucgucaguccgaaagag

SEQ ID NO: 5408 - RNA, 19 nt, Artificial Sequence
  synthetic
uucgucaguccgaaagagg

SEQ ID NO: 5409 - RNA, 19 nt, Artificial Sequence
  synthetic
ucgucaguccgaaagaggc

SEQ ID NO: 5410 - RNA, 19 nt, Artificial Sequence
  synthetic
cgucaguccgaaagaggcg

SEQ ID NO: 5411 - RNA, 19 nt, Artificial Sequence
  synthetic
gucaguccgaaagaggcga

SEQ ID NO: 5412 - RNA, 19 nt, Artificial Sequence
  synthetic
ucaguccgaaagaggcgaa

SEQ ID NO: 5413 - RNA, 19 nt, Artificial Sequence
  synthetic
caguccgaaagaggcgaag

SEQ ID NO: 5414 - RNA, 19 nt, Artificial Sequence
  synthetic
aguccgaaagaggcgaaga

SEQ ID NO: 5415 - RNA, 19 nt, Artificial Sequence
  synthetic
guccgaaagaggcgaagaa

SEQ ID NO: 5416 - RNA, 19 nt, Artificial Sequence
  synthetic
uccgaaagaggcgaagaaa

SEQ ID NO: 5417 - RNA, 19 nt, Artificial Sequence
  synthetic
ccgaaagaggcgaagaaac

SEQ ID NO: 5418 - RNA, 19 nt, Artificial Sequence
  synthetic
cgaaagaggcgaagaaaca

SEQ ID NO: 5419 - RNA, 19 nt, Artificial Sequence
  synthetic
gaaagaggcgaagaaacaa

SEQ ID NO: 5420 - RNA, 19 nt, Artificial Sequence
  synthetic
aaagaggcgaagaaacaau

SEQ ID NO: 5421 - RNA, 19 nt, Artificial Sequence
  synthetic
aagaggcgaagaaacaauu

SEQ ID NO: 5422 - RNA, 19 nt, Artificial Sequence
  synthetic
agaggcgaagaaacaauug

SEQ ID NO: 5423 - RNA, 19 nt, Artificial Sequence
  synthetic
gaggcgaagaaacaauuga

SEQ ID NO: 5424 - RNA, 19 nt, Artificial Sequence
  synthetic
aggcgaagaaacaauugaa

SEQ ID NO: 5425 - RNA, 19 nt, Artificial Sequence
  synthetic
ggcgaagaaacaauugaag

SEQ ID NO: 5426 - RNA, 19 nt, Artificial Sequence
  synthetic
gcgaagaaacaauugaaga

SEQ ID NO: 5427 - RNA, 19 nt, Artificial Sequence
  synthetic
cgaagaaacaauugaagaa

SEQ ID NO: 5428 - RNA, 19 nt, Artificial Sequence
  synthetic
gaagaaacaauugaagaaa

SEQ ID NO: 5429 - RNA, 19 nt, Artificial Sequence
  synthetic
aagaaacaauugaagaaaa

SEQ ID NO: 5430 - RNA, 19 nt, Artificial Sequence
  synthetic
agaaacaauugaagaaaaa

SEQ ID NO: 5431 - RNA, 19 nt, Artificial Sequence
  synthetic
gaaacaauugaagaaaaau

SEQ ID NO: 5432 - RNA, 19 nt, Artificial Sequence
  synthetic
aaacaauugaagaaaaauu

SEQ ID NO: 5433 - RNA, 19 nt, Artificial Sequence
  synthetic
aacaauugaagaaaaauuu

SEQ ID NO: 5434 - RNA, 19 nt, Artificial Sequence
  synthetic
acaauugaagaaaaauuug

SEQ ID NO: 5435 - RNA, 19 nt, Artificial Sequence
  synthetic
caauugaagaaaaauuuga

SEQ ID NO: 5436 - RNA, 19 nt, Artificial Sequence
  synthetic
aauugaagaaaaauuugaa

SEQ ID NO: 5437 - RNA, 19 nt, Artificial Sequence
  synthetic
auugaagaaaaauuugaaa

SEQ ID NO: 5438 - RNA, 19 nt, Artificial Sequence
  synthetic
uugaagaaaaauuugaaau

SEQ ID NO: 5439 - RNA, 19 nt, Artificial Sequence
  synthetic
ugaagaaaaauuugaaauc

SEQ ID NO: 5440 - RNA, 19 nt, Artificial Sequence
  synthetic
gaagaaaaauuugaaaucu

SEQ ID NO: 5441 - RNA, 19 nt, Artificial Sequence
  synthetic
aagaaaaauuugaaaucuc

SEQ ID NO: 5442 - RNA, 19 nt, Artificial Sequence
  synthetic
agaaaaauuugaaaucuca

SEQ ID NO: 5443 - RNA, 19 nt, Artificial Sequence
  synthetic
gaaaaauuugaaaucucag

SEQ ID NO: 5444 - RNA, 19 nt, Artificial Sequence
  synthetic
aaaaauuugaaaucucagg

SEQ ID NO: 5445 - RNA, 19 nt, Artificial Sequence
  synthetic
aaaauuugaaaucucagga

SEQ ID NO: 5446 - RNA, 19 nt, Artificial Sequence
  synthetic
aaauuugaaaucucaggaa

SEQ ID NO: 5447 - RNA, 19 nt, Artificial Sequence
  synthetic
aauuugaaaucucaggaac

SEQ ID NO: 5448 - RNA, 19 nt, Artificial Sequence
  synthetic
auuugaaaucucaggaacu

SEQ ID NO: 5449 - RNA, 19 nt, Artificial Sequence
  synthetic
uuugaaaucucaggaacua

SEQ ID NO: 5450 - RNA, 19 nt, Artificial Sequence
  synthetic
uugaaaucucaggaacuau

SEQ ID NO: 5451 - RNA, 19 nt, Artificial Sequence
  synthetic
ugaaaucucaggaacuaug

SEQ ID NO: 5452 - RNA, 19 nt, Artificial Sequence
  synthetic
gaaaucucaggaacuaugc

SEQ ID NO: 5453 - RNA, 19 nt, Artificial Sequence
  synthetic
aaaucucaggaacuaugcg

SEQ ID NO: 5454 - RNA, 19 nt, Artificial Sequence
  synthetic
aacuaugcgcaggcuugcc

SEQ ID NO: 5455 - RNA, 19 nt, Artificial Sequence
  synthetic
aggcuugccgaccaaaguc

SEQ ID NO: 5456 - RNA, 19 nt, Artificial Sequence
  synthetic
ggcuugccgaccaaagucu

SEQ ID NO: 5457 - RNA, 19 nt, Artificial Sequence
  synthetic
gcuugccgaccaaagucuc

SEQ ID NO: 5458 - RNA, 19 nt, Artificial Sequence
  synthetic
cuugccgaccaaagucucc

SEQ ID NO: 5459 - RNA, 19 nt, Artificial Sequence
  synthetic
uugccgaccaaagucuccc

SEQ ID NO: 5460 - RNA, 19 nt, Artificial Sequence
  synthetic
cgaccaaagucucccgccg

SEQ ID NO: 5461 - RNA, 19 nt, Artificial Sequence
  synthetic
ccgaacuucuccugccuug

SEQ ID NO: 5462 - RNA, 19 nt, Artificial Sequence
  synthetic
cgaacuucuccugccuuga

SEQ ID NO: 5463 - RNA, 19 nt, Artificial Sequence
  synthetic
gaacuucuccugccuugag

SEQ ID NO: 5464 - RNA, 19 nt, Artificial Sequence
  synthetic
aacuucuccugccuugaga

SEQ ID NO: 5465 - RNA, 19 nt, Artificial Sequence
  synthetic
acuucuccugccuugagaa

SEQ ID NO: 5466 - RNA, 19 nt, Artificial Sequence
  synthetic
cuucuccugccuugagaau

SEQ ID NO: 5467 - RNA, 19 nt, Artificial Sequence
  synthetic
uucuccugccuugagaauu

SEQ ID NO: 5468 - RNA, 19 nt, Artificial Sequence
  synthetic
ucuccugccuugagaauuu

SEQ ID NO: 5469 - RNA, 19 nt, Artificial Sequence
  synthetic
cuccugccuugagaauuuu

SEQ ID NO: 5470 - RNA, 19 nt, Artificial Sequence
  synthetic
uccugccuugagaauuuua

SEQ ID NO: 5471 - RNA, 19 nt, Artificial Sequence
  synthetic
ccugccuugagaauuuuag

SEQ ID NO: 5472 - RNA, 19 nt, Artificial Sequence
  synthetic
cugccuugagaauuuuaga

SEQ ID NO: 5473 - RNA, 19 nt, Artificial Sequence
  synthetic
ugccuugagaauuuuagag

SEQ ID NO: 5474 - RNA, 19 nt, Artificial Sequence
  synthetic
gccuugagaauuuuagagc

SEQ ID NO: 5475 - RNA, 19 nt, Artificial Sequence
  synthetic
ccuugagaauuuuagagcc

SEQ ID NO: 5476 - RNA, 19 nt, Artificial Sequence
  synthetic
cuugagaauuuuagagccu

SEQ ID NO: 5477 - RNA, 19 nt, Artificial Sequence
  synthetic
uugagaauuuuagagccua

SEQ ID NO: 5478 - RNA, 19 nt, Artificial Sequence
  synthetic
ugagaauuuuagagccuau

SEQ ID NO: 5479 - RNA, 19 nt, Artificial Sequence
  synthetic
gagaauuuuagagccuaug

SEQ ID NO: 5480 - RNA, 19 nt, Artificial Sequence
  synthetic
agaauuuuagagccuaugu

SEQ ID NO: 5481 - RNA, 19 nt, Artificial Sequence
  synthetic
gaauuuuagagccuaugug

SEQ ID NO: 5482 - RNA, 19 nt, Artificial Sequence
  synthetic
aauuuuagagccuaugugg

SEQ ID NO: 5483 - RNA, 19 nt, Artificial Sequence
  synthetic
auuuuagagccuaugugga

SEQ ID NO: 5484 - RNA, 19 nt, Artificial Sequence
  synthetic
uuuuagagccuauguggau

SEQ ID NO: 5485 - RNA, 19 nt, Artificial Sequence
  synthetic
uuuagagccuauguggaug

SEQ ID NO: 5486 - RNA, 19 nt, Artificial Sequence
  synthetic
uuagagccuauguggaugg

SEQ ID NO: 5487 - RNA, 19 nt, Artificial Sequence
  synthetic
uagagccuauguggaugga

SEQ ID NO: 5488 - RNA, 19 nt, Artificial Sequence
  synthetic
agagccuauguggauggau

SEQ ID NO: 5489 - RNA, 19 nt, Artificial Sequence
  synthetic
gagccuauguggauggauu

SEQ ID NO: 5490 - RNA, 19 nt, Artificial Sequence
  synthetic
agccuauguggauggauuc

SEQ ID NO: 5491 - RNA, 19 nt, Artificial Sequence
  synthetic
gccuauguggauggauucg

SEQ ID NO: 5492 - RNA, 19 nt, Artificial Sequence
  synthetic
ccuauguggauggauucga

SEQ ID NO: 5493 - RNA, 19 nt, Artificial Sequence
  synthetic
cuauguggauggauucgaa

SEQ ID NO: 5494 - RNA, 19 nt, Artificial Sequence
  synthetic
uauguggauggauucgaac

SEQ ID NO: 5495 - RNA, 19 nt, Artificial Sequence
  synthetic
auguggauggauucgaacc

SEQ ID NO: 5496 - RNA, 19 nt, Artificial Sequence
  synthetic
uguggauggauucgaaccg

SEQ ID NO: 5497 - RNA, 19 nt, Artificial Sequence
  synthetic
guggauggauucgaaccga

SEQ ID NO: 5498 - RNA, 19 nt, Artificial Sequence
  synthetic
uggauggauucgaaccgaa

SEQ ID NO: 5499 - RNA, 19 nt, Artificial Sequence
  synthetic
ggauggauucgaaccgaac

SEQ ID NO: 5500 - RNA, 19 nt, Artificial Sequence
  synthetic
gauggauucgaaccgaacg

SEQ ID NO: 5501 - RNA, 19 nt, Artificial Sequence
  synthetic
auggauucgaaccgaacgg

SEQ ID NO: 5502 - RNA, 19 nt, Artificial Sequence
  synthetic
uggauucgaaccgaacggc

SEQ ID NO: 5503 - RNA, 19 nt, Artificial Sequence
  synthetic
ggauucgaaccgaacggcu

SEQ ID NO: 5504 - RNA, 19 nt, Artificial Sequence
  synthetic
gauucgaaccgaacggcug

SEQ ID NO: 5505 - RNA, 19 nt, Artificial Sequence
  synthetic
auucgaaccgaacggcugc

SEQ ID NO: 5506 - RNA, 19 nt, Artificial Sequence
  synthetic
uucgaaccgaacggcugca

SEQ ID NO: 5507 - RNA, 19 nt, Artificial Sequence
  synthetic
ucgaaccgaacggcugcau

SEQ ID NO: 5508 - RNA, 19 nt, Artificial Sequence
  synthetic
cgaaccgaacggcugcauu

SEQ ID NO: 5509 - RNA, 19 nt, Artificial Sequence
  synthetic
gaaccgaacggcugcauug

SEQ ID NO: 5510 - RNA, 19 nt, Artificial Sequence
  synthetic
aaccgaacggcugcauuga

SEQ ID NO: 5511 - RNA, 19 nt, Artificial Sequence
  synthetic
accgaacggcugcauugag

SEQ ID NO: 5512 - RNA, 19 nt, Artificial Sequence
  synthetic
ccgaacggcugcauugagg

SEQ ID NO: 5513 - RNA, 19 nt, Artificial Sequence
  synthetic
cgaacggcugcauugaggg

SEQ ID NO: 5514 - RNA, 19 nt, Artificial Sequence
  synthetic
gaacggcugcauugagggc

SEQ ID NO: 5515 - RNA, 19 nt, Artificial Sequence
  synthetic
aacggcugcauugagggca

SEQ ID NO: 5516 - RNA, 19 nt, Artificial Sequence
  synthetic
acggcugcauugagggcaa

SEQ ID NO: 5517 - RNA, 19 nt, Artificial Sequence
  synthetic
cggcugcauugagggcaag

SEQ ID NO: 5518 - RNA, 19 nt, Artificial Sequence
  synthetic
ggcugcauugagggcaagc

SEQ ID NO: 5519 - RNA, 19 nt, Artificial Sequence
  synthetic
gcugcauugagggcaagcu

SEQ ID NO: 5520 - RNA, 19 nt, Artificial Sequence
  synthetic
cugcauugagggcaagcuu

SEQ ID NO: 5521 - RNA, 19 nt, Artificial Sequence
  synthetic
ugcauugagggcaagcuuu

SEQ ID NO: 5522 - RNA, 19 nt, Artificial Sequence
  synthetic
gcauugagggcaagcuuuc

SEQ ID NO: 5523 - RNA, 19 nt, Artificial Sequence
  synthetic
cauugagggcaagcuuucu

SEQ ID NO: 5524 - RNA, 19 nt, Artificial Sequence
  synthetic
auugagggcaagcuuucuc

SEQ ID NO: 5525 - RNA, 19 nt, Artificial Sequence
  synthetic
uugagggcaagcuuucuca

SEQ ID NO: 5526 - RNA, 19 nt, Artificial Sequence
  synthetic
ugagggcaagcuuucucaa

SEQ ID NO: 5527 - RNA, 19 nt, Artificial Sequence
  synthetic
gagggcaagcuuucucaaa

SEQ ID NO: 5528 - RNA, 19 nt, Artificial Sequence
  synthetic
agggcaagcuuucucaaau

SEQ ID NO: 5529 - RNA, 19 nt, Artificial Sequence
  synthetic
gggcaagcuuucucaaaug

SEQ ID NO: 5530 - RNA, 19 nt, Artificial Sequence
  synthetic
ggcaagcuuucucaaaugu

SEQ ID NO: 5531 - RNA, 19 nt, Artificial Sequence
  synthetic
gcaagcuuucucaaauguc

SEQ ID NO: 5532 - RNA, 19 nt, Artificial Sequence
  synthetic
caagcuuucucaaaugucc

SEQ ID NO: 5533 - RNA, 19 nt, Artificial Sequence
  synthetic
aagcuuucucaaaugucca

SEQ ID NO: 5534 - RNA, 19 nt, Artificial Sequence
  synthetic
agcuuucucaaauguccaa

SEQ ID NO: 5535 - RNA, 19 nt, Artificial Sequence
  synthetic
gcuuucucaaauguccaaa

SEQ ID NO: 5536 - RNA, 19 nt, Artificial Sequence
  synthetic
cuuucucaaauguccaaag

SEQ ID NO: 5537 - RNA, 19 nt, Artificial Sequence
  synthetic
uuucucaaauguccaaaga

SEQ ID NO: 5538 - RNA, 19 nt, Artificial Sequence
  synthetic
uucucaaauguccaaagaa

SEQ ID NO: 5539 - RNA, 19 nt, Artificial Sequence
  synthetic
ucucaaauguccaaagaag

SEQ ID NO: 5540 - RNA, 19 nt, Artificial Sequence
  synthetic
cucaaauguccaaagaagu

SEQ ID NO: 5541 - RNA, 19 nt, Artificial Sequence
  synthetic
ucaaauguccaaagaagug

SEQ ID NO: 5542 - RNA, 19 nt, Artificial Sequence
  synthetic
caaauguccaaagaaguga

SEQ ID NO: 5543 - RNA, 19 nt, Artificial Sequence
  synthetic
aaauguccaaagaagugaa

SEQ ID NO: 5544 - RNA, 19 nt, Artificial Sequence
  synthetic
aauguccaaagaagugaau

SEQ ID NO: 5545 - RNA, 19 nt, Artificial Sequence
  synthetic
auguccaaagaagugaaug

SEQ ID NO: 5546 - RNA, 19 nt, Artificial Sequence
  synthetic
uguccaaagaagugaaugc

SEQ ID NO: 5547 - RNA, 19 nt, Artificial Sequence
  synthetic
guccaaagaagugaaugcc

SEQ ID NO: 5548 - RNA, 19 nt, Artificial Sequence
  synthetic
uccaaagaagugaaugcca

SEQ ID NO: 5549 - RNA, 19 nt, Artificial Sequence
  synthetic
ccaaagaagugaaugccaa

SEQ ID NO: 5550 - RNA, 19 nt, Artificial Sequence
  synthetic
caaagaagugaaugccaaa

SEQ ID NO: 5551 - RNA, 19 nt, Artificial Sequence
  synthetic
aaagaagugaaugccaaaa

SEQ ID NO: 5552 - RNA, 19 nt, Artificial Sequence
  synthetic
aagaagugaaugccaaaau

SEQ ID NO: 5553 - RNA, 19 nt, Artificial Sequence
  synthetic
agaagugaaugccaaaauu

SEQ ID NO: 5554 - RNA, 19 nt, Artificial Sequence
  synthetic
gaagugaaugccaaaauug

SEQ ID NO: 5555 - RNA, 19 nt, Artificial Sequence
  synthetic
aagugaaugccaaaauuga

SEQ ID NO: 5556 - RNA, 19 nt, Artificial Sequence
  synthetic
agugaaugccaaaauugaa

SEQ ID NO: 5557 - RNA, 19 nt, Artificial Sequence
  synthetic
gugaaugccaaaauugaac

SEQ ID NO: 5558 - RNA, 19 nt, Artificial Sequence
  synthetic
ugaaugccaaaauugaacc

SEQ ID NO: 5559 - RNA, 19 nt, Artificial Sequence
  synthetic
gaaugccaaaauugaaccu

SEQ ID NO: 5560 - RNA, 19 nt, Artificial Sequence
  synthetic
aaugccaaaauugaaccuu

SEQ ID NO: 5561 - RNA, 19 nt, Artificial Sequence
  synthetic
augccaaaauugaaccuuu

SEQ ID NO: 5562 - RNA, 19 nt, Artificial Sequence
  synthetic
ugccaaaauugaaccuuuu

SEQ ID NO: 5563 - RNA, 19 nt, Artificial Sequence
  synthetic
gccaaaauugaaccuuuuc

SEQ ID NO: 5564 - RNA, 19 nt, Artificial Sequence
  synthetic
ccaaaauugaaccuuuucu

SEQ ID NO: 5565 - RNA, 19 nt, Artificial Sequence
  synthetic
caaaauugaaccuuuucug

SEQ ID NO: 5566 - RNA, 19 nt, Artificial Sequence
  synthetic
aaaauugaaccuuuucuga

SEQ ID NO: 5567 - RNA, 19 nt, Artificial Sequence
  synthetic
ugaaccuuuucugaagaca

SEQ ID NO: 5568 - RNA, 19 nt, Artificial Sequence
  synthetic
gacaacaccaagaccaauc

SEQ ID NO: 5569 - RNA, 19 nt, Artificial Sequence
  synthetic
acaacaccaagaccaauca

SEQ ID NO: 5570 - RNA, 19 nt, Artificial Sequence
  synthetic
caacaccaagaccaaucaa

SEQ ID NO: 5571 - RNA, 19 nt, Artificial Sequence
  synthetic
aacaccaagaccaaucaaa

SEQ ID NO: 5572 - RNA, 19 nt, Artificial Sequence
  synthetic
acaccaagaccaaucaaac

SEQ ID NO: 5573 - RNA, 19 nt, Artificial Sequence
  synthetic
caccaagaccaaucaaacu

SEQ ID NO: 5574 - RNA, 19 nt, Artificial Sequence
  synthetic
accaagaccaaucaaacuu

SEQ ID NO: 5575 - RNA, 19 nt, Artificial Sequence
  synthetic
ccaagaccaaucaaacuuc

SEQ ID NO: 5576 - RNA, 19 nt, Artificial Sequence
  synthetic
caagaccaaucaaacuucc

SEQ ID NO: 5577 - RNA, 19 nt, Artificial Sequence
  synthetic
acuuccgaauggaccuccu

SEQ ID NO: 5578 - RNA, 19 nt, Artificial Sequence
  synthetic
uuguuaucagcgguccaaa

SEQ ID NO: 5579 - RNA, 19 nt, Artificial Sequence
  synthetic
uguuaucagcgguccaaau

SEQ ID NO: 5580 - RNA, 19 nt, Artificial Sequence
  synthetic
guuaucagcgguccaaauu

SEQ ID NO: 5581 - RNA, 19 nt, Artificial Sequence
  synthetic
uuaucagcgguccaaauuc

SEQ ID NO: 5582 - RNA, 19 nt, Artificial Sequence
  synthetic
uaucagcgguccaaauucc

SEQ ID NO: 5583 - RNA, 19 nt, Artificial Sequence
  synthetic
aucagcgguccaaauuccu

SEQ ID NO: 5584 - RNA, 19 nt, Artificial Sequence
  synthetic
ucagcgguccaaauuccuc

SEQ ID NO: 5585 - RNA, 19 nt, Artificial Sequence
  synthetic
cagcgguccaaauuccucc

SEQ ID NO: 5586 - RNA, 19 nt, Artificial Sequence
  synthetic
agcgguccaaauuccuccu

SEQ ID NO: 5587 - RNA, 19 nt, Artificial Sequence
  synthetic
cgguccaaauuccuccuga

SEQ ID NO: 5588 - RNA, 19 nt, Artificial Sequence
  synthetic
gguccaaauuccuccugau

SEQ ID NO: 5589 - RNA, 19 nt, Artificial Sequence
  synthetic
guccaaauuccuccugaug

SEQ ID NO: 5590 - RNA, 19 nt, Artificial Sequence
  synthetic
uccaaauuccuccugaugg

SEQ ID NO: 5591 - RNA, 19 nt, Artificial Sequence
  synthetic
ccaaauuccuccugaugga

SEQ ID NO: 5592 - RNA, 19 nt, Artificial Sequence
  synthetic
caaauuccuccugauggau

SEQ ID NO: 5593 - RNA, 19 nt, Artificial Sequence
  synthetic
aaauuccuccugauggaug

SEQ ID NO: 5594 - RNA, 19 nt, Artificial Sequence
  synthetic
aauuccuccugauggaugc

SEQ ID NO: 5595 - RNA, 19 nt, Artificial Sequence
  synthetic
auuccuccugauggaugcu

SEQ ID NO: 5596 - RNA, 19 nt, Artificial Sequence
  synthetic
uuccuccugauggaugcuu

SEQ ID NO: 5597 - RNA, 19 nt, Artificial Sequence
  synthetic
uccuccugauggaugcuuu

SEQ ID NO: 5598 - RNA, 19 nt, Artificial Sequence
  synthetic
uuuaaaauugagcauugaa

SEQ ID NO: 5599 - RNA, 19 nt, Artificial Sequence
  synthetic
aaauugagcauugaagacc

SEQ ID NO: 5600 - RNA, 19 nt, Artificial Sequence
  synthetic
aauugagcauugaagaccc

SEQ ID NO: 5601 - RNA, 19 nt, Artificial Sequence
  synthetic
auugagcauugaagaccca

SEQ ID NO: 5602 - RNA, 19 nt, Artificial Sequence
  synthetic
uugagcauugaagacccaa

SEQ ID NO: 5603 - RNA, 19 nt, Artificial Sequence
  synthetic
ugagcauugaagacccaag

SEQ ID NO: 5604 - RNA, 19 nt, Artificial Sequence
  synthetic
gagcauugaagacccaagu

SEQ ID NO: 5605 - RNA, 19 nt, Artificial Sequence
  synthetic
agcauugaagacccaaguc

SEQ ID NO: 5606 - RNA, 19 nt, Artificial Sequence
  synthetic
gcauugaagacccaaguca

SEQ ID NO: 5607 - RNA, 19 nt, Artificial Sequence
  synthetic
cauugaagacccaagucac

SEQ ID NO: 5608 - RNA, 19 nt, Artificial Sequence
  synthetic
auugaagacccaagucacg

SEQ ID NO: 5609 - RNA, 19 nt, Artificial Sequence
  synthetic
uugaagacccaagucacga

SEQ ID NO: 5610 - RNA, 19 nt, Artificial Sequence
  synthetic
ugaagacccaagucacgaa

SEQ ID NO: 5611 - RNA, 19 nt, Artificial Sequence
  synthetic
gaagacccaagucacgaag

SEQ ID NO: 5612 - RNA, 19 nt, Artificial Sequence
  synthetic
aagacccaagucacgaagg

SEQ ID NO: 5613 - RNA, 19 nt, Artificial Sequence
  synthetic
agacccaagucacgaagga

SEQ ID NO: 5614 - RNA, 19 nt, Artificial Sequence
  synthetic
gacccaagucacgaaggag

SEQ ID NO: 5615 - RNA, 19 nt, Artificial Sequence
  synthetic
acccaagucacgaaggaga

SEQ ID NO: 5616 - RNA, 19 nt, Artificial Sequence
  synthetic
cccaagucacgaaggagaa

SEQ ID NO: 5617 - RNA, 19 nt, Artificial Sequence
  synthetic
ccaagucacgaaggagaag

SEQ ID NO: 5618 - RNA, 19 nt, Artificial Sequence
  synthetic
caagucacgaaggagaagg

SEQ ID NO: 5619 - RNA, 19 nt, Artificial Sequence
  synthetic
aagucacgaaggagaaggg

SEQ ID NO: 5620 - RNA, 19 nt, Artificial Sequence
  synthetic
agucacgaaggagaaggga

SEQ ID NO: 5621 - RNA, 19 nt, Artificial Sequence
  synthetic
gucacgaaggagaagggau

SEQ ID NO: 5622 - RNA, 19 nt, Artificial Sequence
  synthetic
agaagggaucccacuauau

SEQ ID NO: 5623 - RNA, 19 nt, Artificial Sequence
  synthetic
uauaugaugcgaucaagug

SEQ ID NO: 5624 - RNA, 19 nt, Artificial Sequence
  synthetic
auaugaugcgaucaagugc

SEQ ID NO: 5625 - RNA, 19 nt, Artificial Sequence
  synthetic
uaugaugcgaucaagugca

SEQ ID NO: 5626 - RNA, 19 nt, Artificial Sequence
  synthetic
augaugcgaucaagugcau

SEQ ID NO: 5627 - RNA, 19 nt, Artificial Sequence
  synthetic
ugaugcgaucaagugcaua

SEQ ID NO: 5628 - RNA, 19 nt, Artificial Sequence
  synthetic
ugcauaaaaacauucuuug

SEQ ID NO: 5629 - RNA, 19 nt, Artificial Sequence
  synthetic
gcauaaaaacauucuuugg

SEQ ID NO: 5630 - RNA, 19 nt, Artificial Sequence
  synthetic
cauaaaaacauucuuugga

SEQ ID NO: 5631 - RNA, 19 nt, Artificial Sequence
  synthetic
auaaaaacauucuuuggau

SEQ ID NO: 5632 - RNA, 19 nt, Artificial Sequence
  synthetic
uaaaaacauucuuuggaug

SEQ ID NO: 5633 - RNA, 19 nt, Artificial Sequence
  synthetic
aaaaacauucuuuggaugg

SEQ ID NO: 5634 - RNA, 19 nt, Artificial Sequence
  synthetic
aaaacauucuuuggaugga

SEQ ID NO: 5635 - RNA, 19 nt, Artificial Sequence
  synthetic
aaacauucuuuggauggaa

SEQ ID NO: 5636 - RNA, 19 nt, Artificial Sequence
  synthetic
aacauucuuuggauggaaa

SEQ ID NO: 5637 - RNA, 19 nt, Artificial Sequence
  synthetic
acauucuuuggauggaaag

SEQ ID NO: 5638 - RNA, 19 nt, Artificial Sequence
  synthetic
cauucuuuggauggaaaga

SEQ ID NO: 5639 - RNA, 19 nt, Artificial Sequence
  synthetic
auucuuuggauggaaagaa

SEQ ID NO: 5640 - RNA, 19 nt, Artificial Sequence
  synthetic
uucuuuggauggaaagaac

SEQ ID NO: 5641 - RNA, 19 nt, Artificial Sequence
  synthetic
ucuuuggauggaaagaacc

SEQ ID NO: 5642 - RNA, 19 nt, Artificial Sequence
  synthetic
gaaagaacccuauauaguc

SEQ ID NO: 5643 - RNA, 19 nt, Artificial Sequence
  synthetic
uauauagucaaaccacacg

SEQ ID NO: 5644 - RNA, 19 nt, Artificial Sequence
  synthetic
auauagucaaaccacacga

SEQ ID NO: 5645 - RNA, 19 nt, Artificial Sequence
  synthetic
uauagucaaaccacacgaa

SEQ ID NO: 5646 - RNA, 19 nt, Artificial Sequence
  synthetic
auagucaaaccacacgaaa

SEQ ID NO: 5647 - RNA, 19 nt, Artificial Sequence
  synthetic
uagucaaaccacacgaaaa

SEQ ID NO: 5648 - RNA, 19 nt, Artificial Sequence
  synthetic
agucaaaccacacgaaaag

SEQ ID NO: 5649 - RNA, 19 nt, Artificial Sequence
  synthetic
gucaaaccacacgaaaagg

SEQ ID NO: 5650 - RNA, 19 nt, Artificial Sequence
  synthetic
ucaaaccacacgaaaaggg

SEQ ID NO: 5651 - RNA, 19 nt, Artificial Sequence
  synthetic
caaaccacacgaaaaggga

SEQ ID NO: 5652 - RNA, 19 nt, Artificial Sequence
  synthetic
aaaccacacgaaaagggaa

SEQ ID NO: 5653 - RNA, 19 nt, Artificial Sequence
  synthetic
aaccacacgaaaagggaau

SEQ ID NO: 5654 - RNA, 19 nt, Artificial Sequence
  synthetic
accacacgaaaagggaaua

SEQ ID NO: 5655 - RNA, 19 nt, Artificial Sequence
  synthetic
ccacacgaaaagggaauaa

SEQ ID NO: 5656 - RNA, 19 nt, Artificial Sequence
  synthetic
cacacgaaaagggaauaaa

SEQ ID NO: 5657 - RNA, 19 nt, Artificial Sequence
  synthetic
acacgaaaagggaauaaau

SEQ ID NO: 5658 - RNA, 19 nt, Artificial Sequence
  synthetic
aauaaauucaaauuaccug

SEQ ID NO: 5659 - RNA, 19 nt, Artificial Sequence
  synthetic
gcugucauggaagcaagua

SEQ ID NO: 5660 - RNA, 19 nt, Artificial Sequence
  synthetic
cugucauggaagcaaguau

SEQ ID NO: 5661 - RNA, 19 nt, Artificial Sequence
  synthetic
ugucauggaagcaaguauu

SEQ ID NO: 5662 - RNA, 19 nt, Artificial Sequence
  synthetic
gucauggaagcaaguauug

SEQ ID NO: 5663 - RNA, 19 nt, Artificial Sequence
  synthetic
ucauggaagcaaguauugu

SEQ ID NO: 5664 - RNA, 19 nt, Artificial Sequence
  synthetic
cauggaagcaaguauuguc

SEQ ID NO: 5665 - RNA, 19 nt, Artificial Sequence
  synthetic
auggaagcaaguauuguca

SEQ ID NO: 5666 - RNA, 19 nt, Artificial Sequence
  synthetic
uggaagcaaguauugucag

SEQ ID NO: 5667 - RNA, 19 nt, Artificial Sequence
  synthetic
ggaagcaaguauugucaga

SEQ ID NO: 5668 - RNA, 19 nt, Artificial Sequence
  synthetic
gaagcaaguauugucagaa

SEQ ID NO: 5669 - RNA, 19 nt, Artificial Sequence
  synthetic
aagcaaguauugucagaau

SEQ ID NO: 5670 - RNA, 19 nt, Artificial Sequence
  synthetic
agcaaguauugucagaauu

SEQ ID NO: 5671 - RNA, 19 nt, Artificial Sequence
  synthetic
gcaaguauugucagaauug

SEQ ID NO: 5672 - RNA, 19 nt, Artificial Sequence
  synthetic
auugucagaauugcaggac

SEQ ID NO: 5673 - RNA, 19 nt, Artificial Sequence
  synthetic
cauugaaaaugaggagaag

SEQ ID NO: 5674 - RNA, 19 nt, Artificial Sequence
  synthetic
gauuccaaggacuaaaaac

SEQ ID NO: 5675 - RNA, 19 nt, Artificial Sequence
  synthetic
ccaaggacuaaaaacauga

SEQ ID NO: 5676 - RNA, 19 nt, Artificial Sequence
  synthetic
caaggacuaaaaacaugaa

SEQ ID NO: 5677 - RNA, 19 nt, Artificial Sequence
  synthetic
aaggacuaaaaacaugaag

SEQ ID NO: 5678 - RNA, 19 nt, Artificial Sequence
  synthetic
aggacuaaaaacaugaaga

SEQ ID NO: 5679 - RNA, 19 nt, Artificial Sequence
  synthetic
ggacuaaaaacaugaagaa

SEQ ID NO: 5680 - RNA, 19 nt, Artificial Sequence
  synthetic
gacuaaaaacaugaagaaa

SEQ ID NO: 5681 - RNA, 19 nt, Artificial Sequence
  synthetic
acuaaaaacaugaagaaaa

SEQ ID NO: 5682 - RNA, 19 nt, Artificial Sequence
  synthetic
cuaaaaacaugaagaaaac

SEQ ID NO: 5683 - RNA, 19 nt, Artificial Sequence
  synthetic
caugaagaaaacgagucaa

SEQ ID NO: 5684 - RNA, 19 nt, Artificial Sequence
  synthetic
augaagaaaacgagucaac

SEQ ID NO: 5685 - RNA, 19 nt, Artificial Sequence
  synthetic
ugaagaaaacgagucaacu

SEQ ID NO: 5686 - RNA, 19 nt, Artificial Sequence
  synthetic
gaagaaaacgagucaacua

SEQ ID NO: 5687 - RNA, 19 nt, Artificial Sequence
  synthetic
aagaaaacgagucaacuaa

SEQ ID NO: 5688 - RNA, 19 nt, Artificial Sequence
  synthetic
agaaaacgagucaacuaaa

SEQ ID NO: 5689 - RNA, 19 nt, Artificial Sequence
  synthetic
gaaaacgagucaacuaaag

SEQ ID NO: 5690 - RNA, 19 nt, Artificial Sequence
  synthetic
aaaacgagucaacuaaagu

SEQ ID NO: 5691 - RNA, 19 nt, Artificial Sequence
  synthetic
aaacgagucaacuaaagug

SEQ ID NO: 5692 - RNA, 19 nt, Artificial Sequence
  synthetic
aacgagucaacuaaagugg

SEQ ID NO: 5693 - RNA, 19 nt, Artificial Sequence
  synthetic
acgagucaacuaaaguggg

SEQ ID NO: 5694 - RNA, 19 nt, Artificial Sequence
  synthetic
cgagucaacuaaagugggc

SEQ ID NO: 5695 - RNA, 19 nt, Artificial Sequence
  synthetic
gagucaacuaaagugggcu

SEQ ID NO: 5696 - RNA, 19 nt, Artificial Sequence
  synthetic
agucaacuaaagugggcuc

SEQ ID NO: 5697 - RNA, 19 nt, Artificial Sequence
  synthetic
gucaacuaaagugggcucu

SEQ ID NO: 5698 - RNA, 19 nt, Artificial Sequence
  synthetic
ucaacuaaagugggcucuu

SEQ ID NO: 5699 - RNA, 19 nt, Artificial Sequence
  synthetic
caacuaaagugggcucuug

SEQ ID NO: 5700 - RNA, 19 nt, Artificial Sequence
  synthetic
aacuaaagugggcucuugg

SEQ ID NO: 5701 - RNA, 19 nt, Artificial Sequence
  synthetic
acuaaagugggcucuuggu

SEQ ID NO: 5702 - RNA, 19 nt, Artificial Sequence
  synthetic
cuaaagugggcucuuggug

SEQ ID NO: 5703 - RNA, 19 nt, Artificial Sequence
  synthetic
uaaagugggcucuugguga

SEQ ID NO: 5704 - RNA, 19 nt, Artificial Sequence
  synthetic
aaagugggcucuuggugaa

SEQ ID NO: 5705 - RNA, 19 nt, Artificial Sequence
  synthetic
aagugggcucuuggugaaa

SEQ ID NO: 5706 - RNA, 19 nt, Artificial Sequence
  synthetic
agugggcucuuggugaaaa

SEQ ID NO: 5707 - RNA, 19 nt, Artificial Sequence
  synthetic
gugggcucuuggugaaaac

SEQ ID NO: 5708 - RNA, 19 nt, Artificial Sequence
  synthetic
ugggcucuuggugaaaaca

SEQ ID NO: 5709 - RNA, 19 nt, Artificial Sequence
  synthetic
gggcucuuggugaaaacau

SEQ ID NO: 5710 - RNA, 19 nt, Artificial Sequence
  synthetic
ggcucuuggugaaaacaug

SEQ ID NO: 5711 - RNA, 19 nt, Artificial Sequence
  synthetic
gcucuuggugaaaacaugg

SEQ ID NO: 5712 - RNA, 19 nt, Artificial Sequence
  synthetic
cucuuggugaaaacauggc

SEQ ID NO: 5713 - RNA, 19 nt, Artificial Sequence
  synthetic
ucuuggugaaaacauggca

SEQ ID NO: 5714 - RNA, 19 nt, Artificial Sequence
  synthetic
cuuggugaaaacauggcac

SEQ ID NO: 5715 - RNA, 19 nt, Artificial Sequence
  synthetic
uuggugaaaacauggcacc

SEQ ID NO: 5716 - RNA, 19 nt, Artificial Sequence
  synthetic
uggugaaaacauggcacca

SEQ ID NO: 5717 - RNA, 19 nt, Artificial Sequence
  synthetic
ggugaaaacauggcaccag

SEQ ID NO: 5718 - RNA, 19 nt, Artificial Sequence
  synthetic
gugaaaacauggcaccaga

SEQ ID NO: 5719 - RNA, 19 nt, Artificial Sequence
  synthetic
ugaaaacauggcaccagag

SEQ ID NO: 5720 - RNA, 19 nt, Artificial Sequence
  synthetic
gaaaacauggcaccagaga

SEQ ID NO: 5721 - RNA, 19 nt, Artificial Sequence
  synthetic
aaaacauggcaccagagaa

SEQ ID NO: 5722 - RNA, 19 nt, Artificial Sequence
  synthetic
aaacauggcaccagagaaa

SEQ ID NO: 5723 - RNA, 19 nt, Artificial Sequence
  synthetic
aacauggcaccagagaaag

SEQ ID NO: 5724 - RNA, 19 nt, Artificial Sequence
  synthetic
acauggcaccagagaaagu

SEQ ID NO: 5725 - RNA, 19 nt, Artificial Sequence
  synthetic
cauggcaccagagaaagua

SEQ ID NO: 5726 - RNA, 19 nt, Artificial Sequence
  synthetic
auggcaccagagaaaguag

SEQ ID NO: 5727 - RNA, 19 nt, Artificial Sequence
  synthetic
uggcaccagagaaaguaga

SEQ ID NO: 5728 - RNA, 19 nt, Artificial Sequence
  synthetic
ggcaccagagaaaguagac

SEQ ID NO: 5729 - RNA, 19 nt, Artificial Sequence
  synthetic
gcaccagagaaaguagacu

SEQ ID NO: 5730 - RNA, 19 nt, Artificial Sequence
  synthetic
caccagagaaaguagacuu

SEQ ID NO: 5731 - RNA, 19 nt, Artificial Sequence
  synthetic
accagagaaaguagacuuu

SEQ ID NO: 5732 - RNA, 19 nt, Artificial Sequence
  synthetic
ccagagaaaguagacuuug

SEQ ID NO: 5733 - RNA, 19 nt, Artificial Sequence
  synthetic
cagagaaaguagacuuuga

SEQ ID NO: 5734 - RNA, 19 nt, Artificial Sequence
  synthetic
agagaaaguagacuuugac

SEQ ID NO: 5735 - RNA, 19 nt, Artificial Sequence
  synthetic
gagaaaguagacuuugaca

SEQ ID NO: 5736 - RNA, 19 nt, Artificial Sequence
  synthetic
agaaaguagacuuugacaa

SEQ ID NO: 5737 - RNA, 19 nt, Artificial Sequence
  synthetic
gaaaguagacuuugacaac

SEQ ID NO: 5738 - RNA, 19 nt, Artificial Sequence
  synthetic
aaaguagacuuugacaacu

SEQ ID NO: 5739 - RNA, 19 nt, Artificial Sequence
  synthetic
aaguagacuuugacaacug

SEQ ID NO: 5740 - RNA, 19 nt, Artificial Sequence
  synthetic
aguagacuuugacaacugc

SEQ ID NO: 5741 - RNA, 19 nt, Artificial Sequence
  synthetic
guagacuuugacaacugca

SEQ ID NO: 5742 - RNA, 19 nt, Artificial Sequence
  synthetic
uagacuuugacaacugcag

SEQ ID NO: 5743 - RNA, 19 nt, Artificial Sequence
  synthetic
agacuuugacaacugcaga

SEQ ID NO: 5744 - RNA, 19 nt, Artificial Sequence
  synthetic
gacuuugacaacugcagag

SEQ ID NO: 5745 - RNA, 19 nt, Artificial Sequence
  synthetic
acuuugacaacugcagaga

SEQ ID NO: 5746 - RNA, 19 nt, Artificial Sequence
  synthetic
cuuugacaacugcagagac

SEQ ID NO: 5747 - RNA, 19 nt, Artificial Sequence
  synthetic
uuugacaacugcagagaca

SEQ ID NO: 5748 - RNA, 19 nt, Artificial Sequence
  synthetic
uugacaacugcagagacau

SEQ ID NO: 5749 - RNA, 19 nt, Artificial Sequence
  synthetic
ugacaacugcagagacaua

SEQ ID NO: 5750 - RNA, 19 nt, Artificial Sequence
  synthetic
gacaacugcagagacauaa

SEQ ID NO: 5751 - RNA, 19 nt, Artificial Sequence
  synthetic
acaacugcagagacauaag

SEQ ID NO: 5752 - RNA, 19 nt, Artificial Sequence
  synthetic
caacugcagagacauaagc

SEQ ID NO: 5753 - RNA, 19 nt, Artificial Sequence
  synthetic
aacugcagagacauaagcg

SEQ ID NO: 5754 - RNA, 19 nt, Artificial Sequence
  synthetic
acugcagagacauaagcga

SEQ ID NO: 5755 - RNA, 19 nt, Artificial Sequence
  synthetic
cugcagagacauaagcgau

SEQ ID NO: 5756 - RNA, 19 nt, Artificial Sequence
  synthetic
ugcagagacauaagcgauu

SEQ ID NO: 5757 - RNA, 19 nt, Artificial Sequence
  synthetic
gcagagacauaagcgauuu

SEQ ID NO: 5758 - RNA, 19 nt, Artificial Sequence
  synthetic
cagagacauaagcgauuug

SEQ ID NO: 5759 - RNA, 19 nt, Artificial Sequence
  synthetic
agagacauaagcgauuuga

SEQ ID NO: 5760 - RNA, 19 nt, Artificial Sequence
  synthetic
gagacauaagcgauuugaa

SEQ ID NO: 5761 - RNA, 19 nt, Artificial Sequence
  synthetic
agacauaagcgauuugaag

SEQ ID NO: 5762 - RNA, 19 nt, Artificial Sequence
  synthetic
gacauaagcgauuugaagc

SEQ ID NO: 5763 - RNA, 19 nt, Artificial Sequence
  synthetic
acauaagcgauuugaagca

SEQ ID NO: 5764 - RNA, 19 nt, Artificial Sequence
  synthetic
cauaagcgauuugaagcaa

SEQ ID NO: 5765 - RNA, 19 nt, Artificial Sequence
  synthetic
auaagcgauuugaagcaau

SEQ ID NO: 5766 - RNA, 19 nt, Artificial Sequence
  synthetic
uaagcgauuugaagcaaua

SEQ ID NO: 5767 - RNA, 19 nt, Artificial Sequence
  synthetic
aagcgauuugaagcaauau

SEQ ID NO: 5768 - RNA, 19 nt, Artificial Sequence
  synthetic
agcgauuugaagcaauaug

SEQ ID NO: 5769 - RNA, 19 nt, Artificial Sequence
  synthetic
gcgauuugaagcaauauga

SEQ ID NO: 5770 - RNA, 19 nt, Artificial Sequence
  synthetic
cgauuugaagcaauaugau

SEQ ID NO: 5771 - RNA, 19 nt, Artificial Sequence
  synthetic
gauuugaagcaauaugaua

SEQ ID NO: 5772 - RNA, 19 nt, Artificial Sequence
  synthetic
auuugaagcaauaugauag

SEQ ID NO: 5773 - RNA, 19 nt, Artificial Sequence
  synthetic
uuugaagcaauaugauagu

SEQ ID NO: 5774 - RNA, 19 nt, Artificial Sequence
  synthetic
uugaagcaauaugauagug

SEQ ID NO: 5775 - RNA, 19 nt, Artificial Sequence
  synthetic
ugaagcaauaugauaguga

SEQ ID NO: 5776 - RNA, 19 nt, Artificial Sequence
  synthetic
gaagcaauaugauagugac

SEQ ID NO: 5777 - RNA, 19 nt, Artificial Sequence
  synthetic
aagcaauaugauagugacg

SEQ ID NO: 5778 - RNA, 19 nt, Artificial Sequence
  synthetic
agcaauaugauagugacga

SEQ ID NO: 5779 - RNA, 19 nt, Artificial Sequence
  synthetic
gcaauaugauagugacgaa

SEQ ID NO: 5780 - RNA, 19 nt, Artificial Sequence
  synthetic
caauaugauagugacgaac

SEQ ID NO: 5781 - RNA, 19 nt, Artificial Sequence
  synthetic
aauaugauagugacgaacc

SEQ ID NO: 5782 - RNA, 19 nt, Artificial Sequence
  synthetic
auaugauagugacgaaccu

SEQ ID NO: 5783 - RNA, 19 nt, Artificial Sequence
  synthetic
uaugauagugacgaaccug

SEQ ID NO: 5784 - RNA, 19 nt, Artificial Sequence
  synthetic
augauagugacgaaccuga

SEQ ID NO: 5785 - RNA, 19 nt, Artificial Sequence
  synthetic
ugauagugacgaaccugaa

SEQ ID NO: 5786 - RNA, 19 nt, Artificial Sequence
  synthetic
gauagugacgaaccugaau

SEQ ID NO: 5787 - RNA, 19 nt, Artificial Sequence
  synthetic
auagugacgaaccugaauu

SEQ ID NO: 5788 - RNA, 19 nt, Artificial Sequence
  synthetic
uagugacgaaccugaauua

SEQ ID NO: 5789 - RNA, 19 nt, Artificial Sequence
  synthetic
agugacgaaccugaauuaa

SEQ ID NO: 5790 - RNA, 19 nt, Artificial Sequence
  synthetic
gugacgaaccugaauuaag

SEQ ID NO: 5791 - RNA, 19 nt, Artificial Sequence
  synthetic
ugacgaaccugaauuaagg

SEQ ID NO: 5792 - RNA, 19 nt, Artificial Sequence
  synthetic
gacgaaccugaauuaaggu

SEQ ID NO: 5793 - RNA, 19 nt, Artificial Sequence
  synthetic
acgaaccugaauuaagguc

SEQ ID NO: 5794 - RNA, 19 nt, Artificial Sequence
  synthetic
cgaaccugaauuaagguca

SEQ ID NO: 5795 - RNA, 19 nt, Artificial Sequence
  synthetic
gaaccugaauuaaggucac

SEQ ID NO: 5796 - RNA, 19 nt, Artificial Sequence
  synthetic
aaccugaauuaaggucacu

SEQ ID NO: 5797 - RNA, 19 nt, Artificial Sequence
  synthetic
accugaauuaaggucacuu

SEQ ID NO: 5798 - RNA, 19 nt, Artificial Sequence
  synthetic
ccugaauuaaggucacuuu

SEQ ID NO: 5799 - RNA, 19 nt, Artificial Sequence
  synthetic
cugaauuaaggucacuuuc

SEQ ID NO: 5800 - RNA, 19 nt, Artificial Sequence
  synthetic
ugaauuaaggucacuuuca

SEQ ID NO: 5801 - RNA, 19 nt, Artificial Sequence
  synthetic
gaauuaaggucacuuucaa

SEQ ID NO: 5802 - RNA, 19 nt, Artificial Sequence
  synthetic
aauuaaggucacuuucaag

SEQ ID NO: 5803 - RNA, 19 nt, Artificial Sequence
  synthetic
auuaaggucacuuucaagc

SEQ ID NO: 5804 - RNA, 19 nt, Artificial Sequence
  synthetic
uuaaggucacuuucaagcu

SEQ ID NO: 5805 - RNA, 19 nt, Artificial Sequence
  synthetic
uaaggucacuuucaagcug

SEQ ID NO: 5806 - RNA, 19 nt, Artificial Sequence
  synthetic
aaggucacuuucaagcugg

SEQ ID NO: 5807 - RNA, 19 nt, Artificial Sequence
  synthetic
aggucacuuucaagcugga

SEQ ID NO: 5808 - RNA, 19 nt, Artificial Sequence
  synthetic
ggucacuuucaagcuggau

SEQ ID NO: 5809 - RNA, 19 nt, Artificial Sequence
  synthetic
gucacuuucaagcuggaua

SEQ ID NO: 5810 - RNA, 19 nt, Artificial Sequence
  synthetic
ucacuuucaagcuggauac

SEQ ID NO: 5811 - RNA, 19 nt, Artificial Sequence
  synthetic
cacuuucaagcuggauaca

SEQ ID NO: 5812 - RNA, 19 nt, Artificial Sequence
  synthetic
acuuucaagcuggauacag

SEQ ID NO: 5813 - RNA, 19 nt, Artificial Sequence
  synthetic
cuuucaagcuggauacaga

SEQ ID NO: 5814 - RNA, 19 nt, Artificial Sequence
  synthetic
uuucaagcuggauacagaa

SEQ ID NO: 5815 - RNA, 19 nt, Artificial Sequence
  synthetic
uucaagcuggauacagaau

SEQ ID NO: 5816 - RNA, 19 nt, Artificial Sequence
  synthetic
ucaagcuggauacagaaug

SEQ ID NO: 5817 - RNA, 19 nt, Artificial Sequence
  synthetic
caagcuggauacagaauga

SEQ ID NO: 5818 - RNA, 19 nt, Artificial Sequence
  synthetic
aagcuggauacagaaugag

SEQ ID NO: 5819 - RNA, 19 nt, Artificial Sequence
  synthetic
agcuggauacagaaugagu

SEQ ID NO: 5820 - RNA, 19 nt, Artificial Sequence
  synthetic
gcuggauacagaaugaguu

SEQ ID NO: 5821 - RNA, 19 nt, Artificial Sequence
  synthetic
cuggauacagaaugaguuc

SEQ ID NO: 5822 - RNA, 19 nt, Artificial Sequence
  synthetic
uggauacagaaugaguuca

SEQ ID NO: 5823 - RNA, 19 nt, Artificial Sequence
  synthetic
ggauacagaaugaguucaa

SEQ ID NO: 5824 - RNA, 19 nt, Artificial Sequence
  synthetic
gauacagaaugaguucaac

SEQ ID NO: 5825 - RNA, 19 nt, Artificial Sequence
  synthetic
auacagaaugaguucaaca

SEQ ID NO: 5826 - RNA, 19 nt, Artificial Sequence
  synthetic
uacagaaugaguucaacaa

SEQ ID NO: 5827 - RNA, 19 nt, Artificial Sequence
  synthetic
acagaaugaguucaacaag

SEQ ID NO: 5828 - RNA, 19 nt, Artificial Sequence
  synthetic
cagaaugaguucaacaagg

SEQ ID NO: 5829 - RNA, 19 nt, Artificial Sequence
  synthetic
agaaugaguucaacaaggc

SEQ ID NO: 5830 - RNA, 19 nt, Artificial Sequence
  synthetic
gaaugaguucaacaaggcc

SEQ ID NO: 5831 - RNA, 19 nt, Artificial Sequence
  synthetic
aaugaguucaacaaggccu

SEQ ID NO: 5832 - RNA, 19 nt, Artificial Sequence
  synthetic
augaguucaacaaggccug

SEQ ID NO: 5833 - RNA, 19 nt, Artificial Sequence
  synthetic
ugaguucaacaaggccugc

SEQ ID NO: 5834 - RNA, 19 nt, Artificial Sequence
  synthetic
gaguucaacaaggccugcg

SEQ ID NO: 5835 - RNA, 19 nt, Artificial Sequence
  synthetic
aguucaacaaggccugcga

SEQ ID NO: 5836 - RNA, 19 nt, Artificial Sequence
  synthetic
guucaacaaggccugcgag

SEQ ID NO: 5837 - RNA, 19 nt, Artificial Sequence
  synthetic
uucaacaaggccugcgagc

SEQ ID NO: 5838 - RNA, 19 nt, Artificial Sequence
  synthetic
ucaacaaggccugcgagcu

SEQ ID NO: 5839 - RNA, 19 nt, Artificial Sequence
  synthetic
caacaaggccugcgagcua

SEQ ID NO: 5840 - RNA, 19 nt, Artificial Sequence
  synthetic
aacaaggccugcgagcuaa

SEQ ID NO: 5841 - RNA, 19 nt, Artificial Sequence
  synthetic
acaaggccugcgagcuaac

SEQ ID NO: 5842 - RNA, 19 nt, Artificial Sequence
  synthetic
caaggccugcgagcuaacu

SEQ ID NO: 5843 - RNA, 19 nt, Artificial Sequence
  synthetic
aaggccugcgagcuaacug

SEQ ID NO: 5844 - RNA, 19 nt, Artificial Sequence
  synthetic
aggccugcgagcuaacuga

SEQ ID NO: 5845 - RNA, 19 nt, Artificial Sequence
  synthetic
ggccugcgagcuaacugau

SEQ ID NO: 5846 - RNA, 19 nt, Artificial Sequence
  synthetic
gccugcgagcuaacugauu

SEQ ID NO: 5847 - RNA, 19 nt, Artificial Sequence
  synthetic
ccugcgagcuaacugauuc

SEQ ID NO: 5848 - RNA, 19 nt, Artificial Sequence
  synthetic
cugcgagcuaacugauuca

SEQ ID NO: 5849 - RNA, 19 nt, Artificial Sequence
  synthetic
uucaaucuggauagagcuc

SEQ ID NO: 5850 - RNA, 19 nt, Artificial Sequence
  synthetic
ucuggauagagcucgauga

SEQ ID NO: 5851 - RNA, 19 nt, Artificial Sequence
  synthetic
cuggauagagcucgaugaa

SEQ ID NO: 5852 - RNA, 19 nt, Artificial Sequence
  synthetic
uggauagagcucgaugaaa

SEQ ID NO: 5853 - RNA, 19 nt, Artificial Sequence
  synthetic
ggauagagcucgaugaaau

SEQ ID NO: 5854 - RNA, 19 nt, Artificial Sequence
  synthetic
gauagagcucgaugaaauu

SEQ ID NO: 5855 - RNA, 19 nt, Artificial Sequence
  synthetic
auagagcucgaugaaauug

SEQ ID NO: 5856 - RNA, 19 nt, Artificial Sequence
  synthetic
uagagcucgaugaaauugg

SEQ ID NO: 5857 - RNA, 19 nt, Artificial Sequence
  synthetic
agagcucgaugaaauugga

SEQ ID NO: 5858 - RNA, 19 nt, Artificial Sequence
  synthetic
gagcucgaugaaauuggag

SEQ ID NO: 5859 - RNA, 19 nt, Artificial Sequence
  synthetic
agcucgaugaaauuggaga

SEQ ID NO: 5860 - RNA, 19 nt, Artificial Sequence
  synthetic
gcucgaugaaauuggagag

SEQ ID NO: 5861 - RNA, 19 nt, Artificial Sequence
  synthetic
cucgaugaaauuggagagg

SEQ ID NO: 5862 - RNA, 19 nt, Artificial Sequence
  synthetic
ucgaugaaauuggagagga

SEQ ID NO: 5863 - RNA, 19 nt, Artificial Sequence
  synthetic
cgaugaaauuggagaggac

SEQ ID NO: 5864 - RNA, 19 nt, Artificial Sequence
  synthetic
gaugaaauuggagaggacg

SEQ ID NO: 5865 - RNA, 19 nt, Artificial Sequence
  synthetic
augaaauuggagaggacgu

SEQ ID NO: 5866 - RNA, 19 nt, Artificial Sequence
  synthetic
cguagccccaauugaguac

SEQ ID NO: 5867 - RNA, 19 nt, Artificial Sequence
  synthetic
uagccccaauugaguacau

SEQ ID NO: 5868 - RNA, 19 nt, Artificial Sequence
  synthetic
agccccaauugaguacauu

SEQ ID NO: 5869 - RNA, 19 nt, Artificial Sequence
  synthetic
gccccaauugaguacauug

SEQ ID NO: 5870 - RNA, 19 nt, Artificial Sequence
  synthetic
ccccaauugaguacauugc

SEQ ID NO: 5871 - RNA, 19 nt, Artificial Sequence
  synthetic
cccaauugaguacauugca

SEQ ID NO: 5872 - RNA, 19 nt, Artificial Sequence
  synthetic
ccaauugaguacauugcaa

SEQ ID NO: 5873 - RNA, 19 nt, Artificial Sequence
  synthetic
caauugaguacauugcaag

SEQ ID NO: 5874 - RNA, 19 nt, Artificial Sequence
  synthetic
aauugaguacauugcaagc

SEQ ID NO: 5875 - RNA, 19 nt, Artificial Sequence
  synthetic
auugaguacauugcaagca

SEQ ID NO: 5876 - RNA, 19 nt, Artificial Sequence
  synthetic
uugaguacauugcaagcau

SEQ ID NO: 5877 - RNA, 19 nt, Artificial Sequence
  synthetic
ugaguacauugcaagcaug

SEQ ID NO: 5878 - RNA, 19 nt, Artificial Sequence
  synthetic
gaguacauugcaagcauga

SEQ ID NO: 5879 - RNA, 19 nt, Artificial Sequence
  synthetic
aguacauugcaagcaugag

SEQ ID NO: 5880 - RNA, 19 nt, Artificial Sequence
  synthetic
guacauugcaagcaugagg

SEQ ID NO: 5881 - RNA, 19 nt, Artificial Sequence
  synthetic
uacauugcaagcaugagga

SEQ ID NO: 5882 - RNA, 19 nt, Artificial Sequence
  synthetic
acauugcaagcaugaggag

SEQ ID NO: 5883 - RNA, 19 nt, Artificial Sequence
  synthetic
cauugcaagcaugaggagg

SEQ ID NO: 5884 - RNA, 19 nt, Artificial Sequence
  synthetic
auugcaagcaugaggagga

SEQ ID NO: 5885 - RNA, 19 nt, Artificial Sequence
  synthetic
uugcaagcaugaggaggaa

SEQ ID NO: 5886 - RNA, 19 nt, Artificial Sequence
  synthetic
ugcaagcaugaggaggaau

SEQ ID NO: 5887 - RNA, 19 nt, Artificial Sequence
  synthetic
gcaagcaugaggaggaauu

SEQ ID NO: 5888 - RNA, 19 nt, Artificial Sequence
  synthetic
caagcaugaggaggaauua

SEQ ID NO: 5889 - RNA, 19 nt, Artificial Sequence
  synthetic
aagcaugaggaggaauuau

SEQ ID NO: 5890 - RNA, 19 nt, Artificial Sequence
  synthetic
agcaugaggaggaauuauu

SEQ ID NO: 5891 - RNA, 19 nt, Artificial Sequence
  synthetic
gcaugaggaggaauuauuu

SEQ ID NO: 5892 - RNA, 19 nt, Artificial Sequence
  synthetic
caugaggaggaauuauuuc

SEQ ID NO: 5893 - RNA, 19 nt, Artificial Sequence
  synthetic
augaggaggaauuauuuca

SEQ ID NO: 5894 - RNA, 19 nt, Artificial Sequence
  synthetic
ugaggaggaauuauuucac

SEQ ID NO: 5895 - RNA, 19 nt, Artificial Sequence
  synthetic
gaggaggaauuauuucaca

SEQ ID NO: 5896 - RNA, 19 nt, Artificial Sequence
  synthetic
aggaggaauuauuucacag

SEQ ID NO: 5897 - RNA, 19 nt, Artificial Sequence
  synthetic
ggaggaauuauuucacagc

SEQ ID NO: 5898 - RNA, 19 nt, Artificial Sequence
  synthetic
gaggaauuauuucacagca

SEQ ID NO: 5899 - RNA, 19 nt, Artificial Sequence
  synthetic
aggaauuauuucacagcag

SEQ ID NO: 5900 - RNA, 19 nt, Artificial Sequence
  synthetic
ggaauuauuucacagcaga

SEQ ID NO: 5901 - RNA, 19 nt, Artificial Sequence
  synthetic
gaauuauuucacagcagag

SEQ ID NO: 5902 - RNA, 19 nt, Artificial Sequence
  synthetic
aauuauuucacagcagagg

SEQ ID NO: 5903 - RNA, 19 nt, Artificial Sequence
  synthetic
auuauuucacagcagaggu

SEQ ID NO: 5904 - RNA, 19 nt, Artificial Sequence
  synthetic
uuauuucacagcagaggug

SEQ ID NO: 5905 - RNA, 19 nt, Artificial Sequence
  synthetic
uauuucacagcagaggugu

SEQ ID NO: 5906 - RNA, 19 nt, Artificial Sequence
  synthetic
auuucacagcagagguguc

SEQ ID NO: 5907 - RNA, 19 nt, Artificial Sequence
  synthetic
uuucacagcagaggugucc

SEQ ID NO: 5908 - RNA, 19 nt, Artificial Sequence
  synthetic
uucacagcagagguguccc

SEQ ID NO: 5909 - RNA, 19 nt, Artificial Sequence
  synthetic
ucacagcagagguguccca

SEQ ID NO: 5910 - RNA, 19 nt, Artificial Sequence
  synthetic
cacagcagaggugucccau

SEQ ID NO: 5911 - RNA, 19 nt, Artificial Sequence
  synthetic
acagcagaggugucccauu

SEQ ID NO: 5912 - RNA, 19 nt, Artificial Sequence
  synthetic
cagcagaggugucccauug

SEQ ID NO: 5913 - RNA, 19 nt, Artificial Sequence
  synthetic
agcagaggugucccauugu

SEQ ID NO: 5914 - RNA, 19 nt, Artificial Sequence
  synthetic
gcagaggugucccauugua

SEQ ID NO: 5915 - RNA, 19 nt, Artificial Sequence
  synthetic
cagaggugucccauuguag

SEQ ID NO: 5916 - RNA, 19 nt, Artificial Sequence
  synthetic
agaggugucccauuguaga

SEQ ID NO: 5917 - RNA, 19 nt, Artificial Sequence
  synthetic
gaggugucccauuguagag

SEQ ID NO: 5918 - RNA, 19 nt, Artificial Sequence
  synthetic
aggugucccauuguagagc

SEQ ID NO: 5919 - RNA, 19 nt, Artificial Sequence
  synthetic
ggugucccauuguagagcc

SEQ ID NO: 5920 - RNA, 19 nt, Artificial Sequence
  synthetic
gugucccauuguagagcca

SEQ ID NO: 5921 - RNA, 19 nt, Artificial Sequence
  synthetic
ugucccauuguagagccac

SEQ ID NO: 5922 - RNA, 19 nt, Artificial Sequence
  synthetic
gucccauuguagagccacu

SEQ ID NO: 5923 - RNA, 19 nt, Artificial Sequence
  synthetic
ucccauuguagagccacug

SEQ ID NO: 5924 - RNA, 19 nt, Artificial Sequence
  synthetic
cccauuguagagccacuga

SEQ ID NO: 5925 - RNA, 19 nt, Artificial Sequence
  synthetic
uguagagccacugaguaca

SEQ ID NO: 5926 - RNA, 19 nt, Artificial Sequence
  synthetic
guagagccacugaguacau

SEQ ID NO: 5927 - RNA, 19 nt, Artificial Sequence
  synthetic
uagagccacugaguacaua

SEQ ID NO: 5928 - RNA, 19 nt, Artificial Sequence
  synthetic
agagccacugaguacauaa

SEQ ID NO: 5929 - RNA, 19 nt, Artificial Sequence
  synthetic
gagccacugaguacauaau

SEQ ID NO: 5930 - RNA, 19 nt, Artificial Sequence
  synthetic
agccacugaguacauaaug

SEQ ID NO: 5931 - RNA, 19 nt, Artificial Sequence
  synthetic
gccacugaguacauaauga

SEQ ID NO: 5932 - RNA, 19 nt, Artificial Sequence
  synthetic
ccacugaguacauaaugaa

SEQ ID NO: 5933 - RNA, 19 nt, Artificial Sequence
  synthetic
cacugaguacauaaugaag

SEQ ID NO: 5934 - RNA, 19 nt, Artificial Sequence
  synthetic
acugaguacauaaugaagg

SEQ ID NO: 5935 - RNA, 19 nt, Artificial Sequence
  synthetic
cugaguacauaaugaaggg

SEQ ID NO: 5936 - RNA, 19 nt, Artificial Sequence
  synthetic
ugaguacauaaugaagggg

SEQ ID NO: 5937 - RNA, 19 nt, Artificial Sequence
  synthetic
gaguacauaaugaaggggg

SEQ ID NO: 5938 - RNA, 19 nt, Artificial Sequence
  synthetic
aguacauaaugaagggggu

SEQ ID NO: 5939 - RNA, 19 nt, Artificial Sequence
  synthetic
guacauaaugaagggggua

SEQ ID NO: 5940 - RNA, 19 nt, Artificial Sequence
  synthetic
uacauaaugaaggggguau

SEQ ID NO: 5941 - RNA, 19 nt, Artificial Sequence
  synthetic
acauaaugaaggggguaua

SEQ ID NO: 5942 - RNA, 19 nt, Artificial Sequence
  synthetic
cauaaugaaggggguauac

SEQ ID NO: 5943 - RNA, 19 nt, Artificial Sequence
  synthetic
auaaugaaggggguauaca

SEQ ID NO: 5944 - RNA, 19 nt, Artificial Sequence
  synthetic
uaaugaaggggguauacau

SEQ ID NO: 5945 - RNA, 19 nt, Artificial Sequence
  synthetic
aaugaaggggguauacauu

SEQ ID NO: 5946 - RNA, 19 nt, Artificial Sequence
  synthetic
augaaggggguauacauua

SEQ ID NO: 5947 - RNA, 19 nt, Artificial Sequence
  synthetic
ugaaggggguauacauuaa

SEQ ID NO: 5948 - RNA, 19 nt, Artificial Sequence
  synthetic
gaaggggguauacauuaau

SEQ ID NO: 5949 - RNA, 19 nt, Artificial Sequence
  synthetic
aaggggguauacauuaaua

SEQ ID NO: 5950 - RNA, 19 nt, Artificial Sequence
  synthetic
aggggguauacauuaauac

SEQ ID NO: 5951 - RNA, 19 nt, Artificial Sequence
  synthetic
ggggguauacauuaauacu

SEQ ID NO: 5952 - RNA, 19 nt, Artificial Sequence
  synthetic
gggguauacauuaauacug

SEQ ID NO: 5953 - RNA, 19 nt, Artificial Sequence
  synthetic
ggguauacauuaauacugc

SEQ ID NO: 5954 - RNA, 19 nt, Artificial Sequence
  synthetic
gguauacauuaauacugcc

SEQ ID NO: 5955 - RNA, 19 nt, Artificial Sequence
  synthetic
ugccuugcucaaugcaucc

SEQ ID NO: 5956 - RNA, 19 nt, Artificial Sequence
  synthetic
ugcucaaugcauccugugc

SEQ ID NO: 5957 - RNA, 19 nt, Artificial Sequence
  synthetic
gcucaaugcauccugugca

SEQ ID NO: 5958 - RNA, 19 nt, Artificial Sequence
  synthetic
cucaaugcauccugugcag

SEQ ID NO: 5959 - RNA, 19 nt, Artificial Sequence
  synthetic
ucaaugcauccugugcagc

SEQ ID NO: 5960 - RNA, 19 nt, Artificial Sequence
  synthetic
caaugcauccugugcagca

SEQ ID NO: 5961 - RNA, 19 nt, Artificial Sequence
  synthetic
aaugcauccugugcagcaa

SEQ ID NO: 5962 - RNA, 19 nt, Artificial Sequence
  synthetic
augcauccugugcagcaau

SEQ ID NO: 5963 - RNA, 19 nt, Artificial Sequence
  synthetic
ugcauccugugcagcaaug

SEQ ID NO: 5964 - RNA, 19 nt, Artificial Sequence
  synthetic
gcauccugugcagcaaugg

SEQ ID NO: 5965 - RNA, 19 nt, Artificial Sequence
  synthetic
cauccugugcagcaaugga

SEQ ID NO: 5966 - RNA, 19 nt, Artificial Sequence
  synthetic
auccugugcagcaauggac

SEQ ID NO: 5967 - RNA, 19 nt, Artificial Sequence
  synthetic
uccugugcagcaauggacg

SEQ ID NO: 5968 - RNA, 19 nt, Artificial Sequence
  synthetic
ccugugcagcaauggacga

SEQ ID NO: 5969 - RNA, 19 nt, Artificial Sequence
  synthetic
cugugcagcaauggacgau

SEQ ID NO: 5970 - RNA, 19 nt, Artificial Sequence
  synthetic
ugugcagcaauggacgauu

SEQ ID NO: 5971 - RNA, 19 nt, Artificial Sequence
  synthetic
gugcagcaauggacgauuu

SEQ ID NO: 5972 - RNA, 19 nt, Artificial Sequence
  synthetic
ugcagcaauggacgauuuu

SEQ ID NO: 5973 - RNA, 19 nt, Artificial Sequence
  synthetic
gcagcaauggacgauuuuc

SEQ ID NO: 5974 - RNA, 19 nt, Artificial Sequence
  synthetic
cagcaauggacgauuuuca

SEQ ID NO: 5975 - RNA, 19 nt, Artificial Sequence
  synthetic
agcaauggacgauuuucaa

SEQ ID NO: 5976 - RNA, 19 nt, Artificial Sequence
  synthetic
uuuucaacuaauucccaug

SEQ ID NO: 5977 - RNA, 19 nt, Artificial Sequence
  synthetic
augauaagcaagugcagaa

SEQ ID NO: 5978 - RNA, 19 nt, Artificial Sequence
  synthetic
ugauaagcaagugcagaac

SEQ ID NO: 5979 - RNA, 19 nt, Artificial Sequence
  synthetic
gauaagcaagugcagaacu

SEQ ID NO: 5980 - RNA, 19 nt, Artificial Sequence
  synthetic
auaagcaagugcagaacua

SEQ ID NO: 5981 - RNA, 19 nt, Artificial Sequence
  synthetic
uaagcaagugcagaacuaa

SEQ ID NO: 5982 - RNA, 19 nt, Artificial Sequence
  synthetic
aagcaagugcagaacuaaa

SEQ ID NO: 5983 - RNA, 19 nt, Artificial Sequence
  synthetic
agcaagugcagaacuaaag

SEQ ID NO: 5984 - RNA, 19 nt, Artificial Sequence
  synthetic
gcaagugcagaacuaaaga

SEQ ID NO: 5985 - RNA, 19 nt, Artificial Sequence
  synthetic
caagugcagaacuaaagag

SEQ ID NO: 5986 - RNA, 19 nt, Artificial Sequence
  synthetic
aagugcagaacuaaagagg

SEQ ID NO: 5987 - RNA, 19 nt, Artificial Sequence
  synthetic
agugcagaacuaaagaggg

SEQ ID NO: 5988 - RNA, 19 nt, Artificial Sequence
  synthetic
gugcagaacuaaagaggga

SEQ ID NO: 5989 - RNA, 19 nt, Artificial Sequence
  synthetic
ugcagaacuaaagagggaa

SEQ ID NO: 5990 - RNA, 19 nt, Artificial Sequence
  synthetic
gcagaacuaaagagggaag

SEQ ID NO: 5991 - RNA, 19 nt, Artificial Sequence
  synthetic
uaaagagggaaggcgaaaa

SEQ ID NO: 5992 - RNA, 19 nt, Artificial Sequence
  synthetic
cgaaaaaccaauuuauaug

SEQ ID NO: 5993 - RNA, 19 nt, Artificial Sequence
  synthetic
gaaaaaccaauuuauaugg

SEQ ID NO: 5994 - RNA, 19 nt, Artificial Sequence
  synthetic
aaaaaccaauuuauaugga

SEQ ID NO: 5995 - RNA, 19 nt, Artificial Sequence
  synthetic
aaaaccaauuuauauggau

SEQ ID NO: 5996 - RNA, 19 nt, Artificial Sequence
  synthetic
aaaccaauuuauauggauu

SEQ ID NO: 5997 - RNA, 19 nt, Artificial Sequence
  synthetic
aaccaauuuauauggauuc

SEQ ID NO: 5998 - RNA, 19 nt, Artificial Sequence
  synthetic
accaauuuauauggauuca

SEQ ID NO: 5999 - RNA, 19 nt, Artificial Sequence
  synthetic
ccaauuuauauggauucau

SEQ ID NO: 6000 - RNA, 19 nt, Artificial Sequence
  synthetic
caauuuauauggauucauc

SEQ ID NO: 6001 - RNA, 19 nt, Artificial Sequence
  synthetic
aauuuauauggauucauca

SEQ ID NO: 6002 - RNA, 19 nt, Artificial Sequence
  synthetic
auuuauauggauucaucau

SEQ ID NO: 6003 - RNA, 19 nt, Artificial Sequence
  synthetic
uuuauauggauucaucaua

SEQ ID NO: 6004 - RNA, 19 nt, Artificial Sequence
  synthetic
uuauauggauucaucauaa

SEQ ID NO: 6005 - RNA, 19 nt, Artificial Sequence
  synthetic
uauauggauucaucauaaa

SEQ ID NO: 6006 - RNA, 19 nt, Artificial Sequence
  synthetic
caucauaaaaggaagaucu

SEQ ID NO: 6007 - RNA, 19 nt, Artificial Sequence
  synthetic
ggaagaucucauuuaagga

SEQ ID NO: 6008 - RNA, 19 nt, Artificial Sequence
  synthetic
gaagaucucauuuaaggaa

SEQ ID NO: 6009 - RNA, 19 nt, Artificial Sequence
  synthetic
aagaucucauuuaaggaau

SEQ ID NO: 6010 - RNA, 19 nt, Artificial Sequence
  synthetic
agaucucauuuaaggaaug

SEQ ID NO: 6011 - RNA, 19 nt, Artificial Sequence
  synthetic
gaucucauuuaaggaauga

SEQ ID NO: 6012 - RNA, 19 nt, Artificial Sequence
  synthetic
aucucauuuaaggaaugac

SEQ ID NO: 6013 - RNA, 19 nt, Artificial Sequence
  synthetic
ucucauuuaaggaaugaca

SEQ ID NO: 6014 - RNA, 19 nt, Artificial Sequence
  synthetic
cucauuuaaggaaugacac

SEQ ID NO: 6015 - RNA, 19 nt, Artificial Sequence
  synthetic
ucauuuaaggaaugacaca

SEQ ID NO: 6016 - RNA, 19 nt, Artificial Sequence
  synthetic
cauuuaaggaaugacacag

SEQ ID NO: 6017 - RNA, 19 nt, Artificial Sequence
  synthetic
auuuaaggaaugacacaga

SEQ ID NO: 6018 - RNA, 19 nt, Artificial Sequence
  synthetic
uuuaaggaaugacacagau

SEQ ID NO: 6019 - RNA, 19 nt, Artificial Sequence
  synthetic
uuaaggaaugacacagaug

SEQ ID NO: 6020 - RNA, 19 nt, Artificial Sequence
  synthetic
uaaggaaugacacagaugu

SEQ ID NO: 6021 - RNA, 19 nt, Artificial Sequence
  synthetic
aaggaaugacacagaugug

SEQ ID NO: 6022 - RNA, 19 nt, Artificial Sequence
  synthetic
aggaaugacacagaugugg

SEQ ID NO: 6023 - RNA, 19 nt, Artificial Sequence
  synthetic
ggaaugacacagauguggu

SEQ ID NO: 6024 - RNA, 19 nt, Artificial Sequence
  synthetic
gaaugacacagauguggua

SEQ ID NO: 6025 - RNA, 19 nt, Artificial Sequence
  synthetic
aaugacacagaugugguaa

SEQ ID NO: 6026 - RNA, 19 nt, Artificial Sequence
  synthetic
augacacagaugugguaaa

SEQ ID NO: 6027 - RNA, 19 nt, Artificial Sequence
  synthetic
ugacacagaugugguaaac

SEQ ID NO: 6028 - RNA, 19 nt, Artificial Sequence
  synthetic
gacacagaugugguaaacu

SEQ ID NO: 6029 - RNA, 19 nt, Artificial Sequence
  synthetic
acacagaugugguaaacuu

SEQ ID NO: 6030 - RNA, 19 nt, Artificial Sequence
  synthetic
cacagaugugguaaacuuu

SEQ ID NO: 6031 - RNA, 19 nt, Artificial Sequence
  synthetic
acagaugugguaaacuuug

SEQ ID NO: 6032 - RNA, 19 nt, Artificial Sequence
  synthetic
cagaugugguaaacuuugu

SEQ ID NO: 6033 - RNA, 19 nt, Artificial Sequence
  synthetic
agaugugguaaacuuugug

SEQ ID NO: 6034 - RNA, 19 nt, Artificial Sequence
  synthetic
gaugugguaaacuuuguga

SEQ ID NO: 6035 - RNA, 19 nt, Artificial Sequence
  synthetic
augugguaaacuuugugag

SEQ ID NO: 6036 - RNA, 19 nt, Artificial Sequence
  synthetic
ugugguaaacuuugugagc

SEQ ID NO: 6037 - RNA, 19 nt, Artificial Sequence
  synthetic
gugguaaacuuugugagca

SEQ ID NO: 6038 - RNA, 19 nt, Artificial Sequence
  synthetic
ugguaaacuuugugagcau

SEQ ID NO: 6039 - RNA, 19 nt, Artificial Sequence
  synthetic
gguaaacuuugugagcaug

SEQ ID NO: 6040 - RNA, 19 nt, Artificial Sequence
  synthetic
guaaacuuugugagcaugg

SEQ ID NO: 6041 - RNA, 19 nt, Artificial Sequence
  synthetic
uaaacuuugugagcaugga

SEQ ID NO: 6042 - RNA, 19 nt, Artificial Sequence
  synthetic
gagcauggaguuuucucuc

SEQ ID NO: 6043 - RNA, 19 nt, Artificial Sequence
  synthetic
uuuucucucacugacccga

SEQ ID NO: 6044 - RNA, 19 nt, Artificial Sequence
  synthetic
uuucucucacugacccgag

SEQ ID NO: 6045 - RNA, 19 nt, Artificial Sequence
  synthetic
uucucucacugacccgaga

SEQ ID NO: 6046 - RNA, 19 nt, Artificial Sequence
  synthetic
ucucucacugacccgagac

SEQ ID NO: 6047 - RNA, 19 nt, Artificial Sequence
  synthetic
cucucacugacccgagacu

SEQ ID NO: 6048 - RNA, 19 nt, Artificial Sequence
  synthetic
cacugacccgagacuugag

SEQ ID NO: 6049 - RNA, 19 nt, Artificial Sequence
  synthetic
gagccacauaaaugggaga

SEQ ID NO: 6050 - RNA, 19 nt, Artificial Sequence
  synthetic
agccacauaaaugggagaa

SEQ ID NO: 6051 - RNA, 19 nt, Artificial Sequence
  synthetic
gccacauaaaugggagaaa

SEQ ID NO: 6052 - RNA, 19 nt, Artificial Sequence
  synthetic
ccacauaaaugggagaaau

SEQ ID NO: 6053 - RNA, 19 nt, Artificial Sequence
  synthetic
cacauaaaugggagaaaua

SEQ ID NO: 6054 - RNA, 19 nt, Artificial Sequence
  synthetic
acauaaaugggagaaauac

SEQ ID NO: 6055 - RNA, 19 nt, Artificial Sequence
  synthetic
cauaaaugggagaaauacu

SEQ ID NO: 6056 - RNA, 19 nt, Artificial Sequence
  synthetic
auaaaugggagaaauacug

SEQ ID NO: 6057 - RNA, 19 nt, Artificial Sequence
  synthetic
uaaaugggagaaauacugu

SEQ ID NO: 6058 - RNA, 19 nt, Artificial Sequence
  synthetic
aaaugggagaaauacugug

SEQ ID NO: 6059 - RNA, 19 nt, Artificial Sequence
  synthetic
aaugggagaaauacugugu

SEQ ID NO: 6060 - RNA, 19 nt, Artificial Sequence
  synthetic
augggagaaauacuguguc

SEQ ID NO: 6061 - RNA, 19 nt, Artificial Sequence
  synthetic
ugggagaaauacugugucc

SEQ ID NO: 6062 - RNA, 19 nt, Artificial Sequence
  synthetic
gggagaaauacuguguccu

SEQ ID NO: 6063 - RNA, 19 nt, Artificial Sequence
  synthetic
ggagaaauacuguguccuu

SEQ ID NO: 6064 - RNA, 19 nt, Artificial Sequence
  synthetic
gagaaauacuguguccuug

SEQ ID NO: 6065 - RNA, 19 nt, Artificial Sequence
  synthetic
agaaauacuguguccuuga

SEQ ID NO: 6066 - RNA, 19 nt, Artificial Sequence
  synthetic
auacuguguccuugagaua

SEQ ID NO: 6067 - RNA, 19 nt, Artificial Sequence
  synthetic
aggagauauguuacuaaga

SEQ ID NO: 6068 - RNA, 19 nt, Artificial Sequence
  synthetic
cuaagaagugccauaggcc

SEQ ID NO: 6069 - RNA, 19 nt, Artificial Sequence
  synthetic
uaagaagugccauaggcca

SEQ ID NO: 6070 - RNA, 19 nt, Artificial Sequence
  synthetic
aagaagugccauaggccaa

SEQ ID NO: 6071 - RNA, 19 nt, Artificial Sequence
  synthetic
agaagugccauaggccaaa

SEQ ID NO: 6072 - RNA, 19 nt, Artificial Sequence
  synthetic
gaagugccauaggccaaau

SEQ ID NO: 6073 - RNA, 19 nt, Artificial Sequence
  synthetic
aagugccauaggccaaauu

SEQ ID NO: 6074 - RNA, 19 nt, Artificial Sequence
  synthetic
ccauaggccaaauuucaag

SEQ ID NO: 6075 - RNA, 19 nt, Artificial Sequence
  synthetic
auaggccaaauuucaaggc

SEQ ID NO: 6076 - RNA, 19 nt, Artificial Sequence
  synthetic
uaggccaaauuucaaggcc

SEQ ID NO: 6077 - RNA, 19 nt, Artificial Sequence
  synthetic
ggccaaauuucaaggccua

SEQ ID NO: 6078 - RNA, 19 nt, Artificial Sequence
  synthetic
gccaaauuucaaggccuau

SEQ ID NO: 6079 - RNA, 19 nt, Artificial Sequence
  synthetic
ccaaauuucaaggccuaug

SEQ ID NO: 6080 - RNA, 19 nt, Artificial Sequence
  synthetic
caaauuucaaggccuaugu

SEQ ID NO: 6081 - RNA, 19 nt, Artificial Sequence
  synthetic
aaauuucaaggccuauguu

SEQ ID NO: 6082 - RNA, 19 nt, Artificial Sequence
  synthetic
auuucaaggccuauguucu

SEQ ID NO: 6083 - RNA, 19 nt, Artificial Sequence
  synthetic
uuucaaggccuauguucuu

SEQ ID NO: 6084 - RNA, 19 nt, Artificial Sequence
  synthetic
uucaaggccuauguucuug

SEQ ID NO: 6085 - RNA, 19 nt, Artificial Sequence
  synthetic
ucaaggccuauguucuugu

SEQ ID NO: 6086 - RNA, 19 nt, Artificial Sequence
  synthetic
caaggccuauguucuugua

SEQ ID NO: 6087 - RNA, 19 nt, Artificial Sequence
  synthetic
aaggccuauguucuuguau

SEQ ID NO: 6088 - RNA, 19 nt, Artificial Sequence
  synthetic
aggccuauguucuuguaug

SEQ ID NO: 6089 - RNA, 19 nt, Artificial Sequence
  synthetic
ggccuauguucuuguaugu

SEQ ID NO: 6090 - RNA, 19 nt, Artificial Sequence
  synthetic
gccuauguucuuguaugug

SEQ ID NO: 6091 - RNA, 19 nt, Artificial Sequence
  synthetic
ccuauguucuuguauguga

SEQ ID NO: 6092 - RNA, 19 nt, Artificial Sequence
  synthetic
cuauguucuuguaugugag

SEQ ID NO: 6093 - RNA, 19 nt, Artificial Sequence
  synthetic
uauguucuuguaugugagg

SEQ ID NO: 6094 - RNA, 19 nt, Artificial Sequence
  synthetic
auguucuuguaugugagga

SEQ ID NO: 6095 - RNA, 19 nt, Artificial Sequence
  synthetic
uguucuuguaugugaggac

SEQ ID NO: 6096 - RNA, 19 nt, Artificial Sequence
  synthetic
guucuuguaugugaggaca

SEQ ID NO: 6097 - RNA, 19 nt, Artificial Sequence
  synthetic
uucuuguaugugaggacaa

SEQ ID NO: 6098 - RNA, 19 nt, Artificial Sequence
  synthetic
ucuuguaugugaggacaaa

SEQ ID NO: 6099 - RNA, 19 nt, Artificial Sequence
  synthetic
cuuguaugugaggacaaac

SEQ ID NO: 6100 - RNA, 19 nt, Artificial Sequence
  synthetic
uuguaugugaggacaaacg

SEQ ID NO: 6101 - RNA, 19 nt, Artificial Sequence
  synthetic
uguaugugaggacaaacgg

SEQ ID NO: 6102 - RNA, 19 nt, Artificial Sequence
  synthetic
guaugugaggacaaacgga

SEQ ID NO: 6103 - RNA, 19 nt, Artificial Sequence
  synthetic
uaugugaggacaaacggaa

SEQ ID NO: 6104 - RNA, 19 nt, Artificial Sequence
  synthetic
augugaggacaaacggaac

SEQ ID NO: 6105 - RNA, 19 nt, Artificial Sequence
  synthetic
ugugaggacaaacggaaca

SEQ ID NO: 6106 - RNA, 19 nt, Artificial Sequence
  synthetic
gugaggacaaacggaacau

SEQ ID NO: 6107 - RNA, 19 nt, Artificial Sequence
  synthetic
ugaggacaaacggaacauc

SEQ ID NO: 6108 - RNA, 19 nt, Artificial Sequence
  synthetic
gaggacaaacggaacauca

SEQ ID NO: 6109 - RNA, 19 nt, Artificial Sequence
  synthetic
aggacaaacggaacaucaa

SEQ ID NO: 6110 - RNA, 19 nt, Artificial Sequence
  synthetic
ggacaaacggaacaucaaa

SEQ ID NO: 6111 - RNA, 19 nt, Artificial Sequence
  synthetic
gacaaacggaacaucaaag

SEQ ID NO: 6112 - RNA, 19 nt, Artificial Sequence
  synthetic
acaaacggaacaucaaagg

SEQ ID NO: 6113 - RNA, 19 nt, Artificial Sequence
  synthetic
caaacggaacaucaaaggu

SEQ ID NO: 6114 - RNA, 19 nt, Artificial Sequence
  synthetic
aaacggaacaucaaagguc

SEQ ID NO: 6115 - RNA, 19 nt, Artificial Sequence
  synthetic
aacggaacaucaaagguca

SEQ ID NO: 6116 - RNA, 19 nt, Artificial Sequence
  synthetic
acggaacaucaaaggucaa

SEQ ID NO: 6117 - RNA, 19 nt, Artificial Sequence
  synthetic
cggaacaucaaaggucaaa

SEQ ID NO: 6118 - RNA, 19 nt, Artificial Sequence
  synthetic
ggaacaucaaaggucaaaa

SEQ ID NO: 6119 - RNA, 19 nt, Artificial Sequence
  synthetic
gaacaucaaaggucaaaau

SEQ ID NO: 6120 - RNA, 19 nt, Artificial Sequence
  synthetic
aacaucaaaggucaaaaug

SEQ ID NO: 6121 - RNA, 19 nt, Artificial Sequence
  synthetic
acaucaaaggucaaaauga

SEQ ID NO: 6122 - RNA, 19 nt, Artificial Sequence
  synthetic
caucaaaggucaaaaugaa

SEQ ID NO: 6123 - RNA, 19 nt, Artificial Sequence
  synthetic
aucaaaggucaaaaugaaa

SEQ ID NO: 6124 - RNA, 19 nt, Artificial Sequence
  synthetic
ucaaaggucaaaaugaaau

SEQ ID NO: 6125 - RNA, 19 nt, Artificial Sequence
  synthetic
caaaggucaaaaugaaaug

SEQ ID NO: 6126 - RNA, 19 nt, Artificial Sequence
  synthetic
aaaggucaaaaugaaaugg

SEQ ID NO: 6127 - RNA, 19 nt, Artificial Sequence
  synthetic
aaggucaaaaugaaauggg

SEQ ID NO: 6128 - RNA, 19 nt, Artificial Sequence
  synthetic
aggucaaaaugaaaugggg

SEQ ID NO: 6129 - RNA, 19 nt, Artificial Sequence
  synthetic
ggucaaaaugaaaugggga

SEQ ID NO: 6130 - RNA, 19 nt, Artificial Sequence
  synthetic
gucaaaaugaaauggggaa

SEQ ID NO: 6131 - RNA, 19 nt, Artificial Sequence
  synthetic
ucaaaaugaaauggggaau

SEQ ID NO: 6132 - RNA, 19 nt, Artificial Sequence
  synthetic
caaaaugaaauggggaaug

SEQ ID NO: 6133 - RNA, 19 nt, Artificial Sequence
  synthetic
aaaaugaaauggggaaugg

SEQ ID NO: 6134 - RNA, 19 nt, Artificial Sequence
  synthetic
aaaugaaauggggaaugga

SEQ ID NO: 6135 - RNA, 19 nt, Artificial Sequence
  synthetic
aaugaaauggggaauggag

SEQ ID NO: 6136 - RNA, 19 nt, Artificial Sequence
  synthetic
augaaauggggaauggaga

SEQ ID NO: 6137 - RNA, 19 nt, Artificial Sequence
  synthetic
ugaaauggggaauggagau

SEQ ID NO: 6138 - RNA, 19 nt, Artificial Sequence
  synthetic
gaaauggggaauggagaug

SEQ ID NO: 6139 - RNA, 19 nt, Artificial Sequence
  synthetic
aaauggggaauggagauga

SEQ ID NO: 6140 - RNA, 19 nt, Artificial Sequence
  synthetic
aauggggaauggagaugag

SEQ ID NO: 6141 - RNA, 19 nt, Artificial Sequence
  synthetic
auggggaauggagaugaga

SEQ ID NO: 6142 - RNA, 19 nt, Artificial Sequence
  synthetic
uggggaauggagaugagac

SEQ ID NO: 6143 - RNA, 19 nt, Artificial Sequence
  synthetic
ggggaauggagaugagacg

SEQ ID NO: 6144 - RNA, 19 nt, Artificial Sequence
  synthetic
gggaauggagaugagacgu

SEQ ID NO: 6145 - RNA, 19 nt, Artificial Sequence
  synthetic
ggaauggagaugagacguu

SEQ ID NO: 6146 - RNA, 19 nt, Artificial Sequence
  synthetic
gaauggagaugagacguug

SEQ ID NO: 6147 - RNA, 19 nt, Artificial Sequence
  synthetic
aauggagaugagacguugc

SEQ ID NO: 6148 - RNA, 19 nt, Artificial Sequence
  synthetic
auggagaugagacguugcc

SEQ ID NO: 6149 - RNA, 19 nt, Artificial Sequence
  synthetic
uggagaugagacguugccu

SEQ ID NO: 6150 - RNA, 19 nt, Artificial Sequence
  synthetic
ggagaugagacguugccuc

SEQ ID NO: 6151 - RNA, 19 nt, Artificial Sequence
  synthetic
gagaugagacguugccucc

SEQ ID NO: 6152 - RNA, 19 nt, Artificial Sequence
  synthetic
agaugagacguugccuccu

SEQ ID NO: 6153 - RNA, 19 nt, Artificial Sequence
  synthetic
gagacguugccuccuucag

SEQ ID NO: 6154 - RNA, 19 nt, Artificial Sequence
  synthetic
gucacuccagcagaucgag

SEQ ID NO: 6155 - RNA, 19 nt, Artificial Sequence
  synthetic
gagagcaugauugaagccg

SEQ ID NO: 6156 - RNA, 19 nt, Artificial Sequence
  synthetic
agagcaugauugaagccga

SEQ ID NO: 6157 - RNA, 19 nt, Artificial Sequence
  synthetic
gagcaugauugaagccgag

SEQ ID NO: 6158 - RNA, 19 nt, Artificial Sequence
  synthetic
agcaugauugaagccgagu

SEQ ID NO: 6159 - RNA, 19 nt, Artificial Sequence
  synthetic
gcaugauugaagccgaguc

SEQ ID NO: 6160 - RNA, 19 nt, Artificial Sequence
  synthetic
caugauugaagccgagucc

SEQ ID NO: 6161 - RNA, 19 nt, Artificial Sequence
  synthetic
augauugaagccgaguccu

SEQ ID NO: 6162 - RNA, 19 nt, Artificial Sequence
  synthetic
ugauugaagccgaguccuc

SEQ ID NO: 6163 - RNA, 19 nt, Artificial Sequence
  synthetic
gauugaagccgaguccucg

SEQ ID NO: 6164 - RNA, 19 nt, Artificial Sequence
  synthetic
guccucgguuaaagagaaa

SEQ ID NO: 6165 - RNA, 19 nt, Artificial Sequence
  synthetic
uuaaagagaaagacaugac

SEQ ID NO: 6166 - RNA, 19 nt, Artificial Sequence
  synthetic
uaaagagaaagacaugacc

SEQ ID NO: 6167 - RNA, 19 nt, Artificial Sequence
  synthetic
aaagagaaagacaugacca

SEQ ID NO: 6168 - RNA, 19 nt, Artificial Sequence
  synthetic
aagagaaagacaugaccaa

SEQ ID NO: 6169 - RNA, 19 nt, Artificial Sequence
  synthetic
agagaaagacaugaccaaa

SEQ ID NO: 6170 - RNA, 19 nt, Artificial Sequence
  synthetic
gagaaagacaugaccaaag

SEQ ID NO: 6171 - RNA, 19 nt, Artificial Sequence
  synthetic
agaaagacaugaccaaaga

SEQ ID NO: 6172 - RNA, 19 nt, Artificial Sequence
  synthetic
gaaagacaugaccaaagag

SEQ ID NO: 6173 - RNA, 19 nt, Artificial Sequence
  synthetic
aaagacaugaccaaagagu

SEQ ID NO: 6174 - RNA, 19 nt, Artificial Sequence
  synthetic
aagacaugaccaaagaguu

SEQ ID NO: 6175 - RNA, 19 nt, Artificial Sequence
  synthetic
agacaugaccaaagaguuu

SEQ ID NO: 6176 - RNA, 19 nt, Artificial Sequence
  synthetic
gacaugaccaaagaguuuu

SEQ ID NO: 6177 - RNA, 19 nt, Artificial Sequence
  synthetic
acaugaccaaagaguuuuu

SEQ ID NO: 6178 - RNA, 19 nt, Artificial Sequence
  synthetic
caugaccaaagaguuuuuu

SEQ ID NO: 6179 - RNA, 19 nt, Artificial Sequence
  synthetic
augaccaaagaguuuuuug

SEQ ID NO: 6180 - RNA, 19 nt, Artificial Sequence
  synthetic
ugaccaaagaguuuuuuga

SEQ ID NO: 6181 - RNA, 19 nt, Artificial Sequence
  synthetic
gaccaaagaguuuuuugag

SEQ ID NO: 6182 - RNA, 19 nt, Artificial Sequence
  synthetic
accaaagaguuuuuugaga

SEQ ID NO: 6183 - RNA, 19 nt, Artificial Sequence
  synthetic
ccaaagaguuuuuugagaa

SEQ ID NO: 6184 - RNA, 19 nt, Artificial Sequence
  synthetic
caaagaguuuuuugagaau

SEQ ID NO: 6185 - RNA, 19 nt, Artificial Sequence
  synthetic
aaagaguuuuuugagaaua

SEQ ID NO: 6186 - RNA, 19 nt, Artificial Sequence
  synthetic
aagaguuuuuugagaauaa

SEQ ID NO: 6187 - RNA, 19 nt, Artificial Sequence
  synthetic
agaguuuuuugagaauaaa

SEQ ID NO: 6188 - RNA, 19 nt, Artificial Sequence
  synthetic
gaguuuuuugagaauaaau

SEQ ID NO: 6189 - RNA, 19 nt, Artificial Sequence
  synthetic
aguuuuuugagaauaaauc

SEQ ID NO: 6190 - RNA, 19 nt, Artificial Sequence
  synthetic
guuuuuugagaauaaauca

SEQ ID NO: 6191 - RNA, 19 nt, Artificial Sequence
  synthetic
uuuuuugagaauaaaucag

SEQ ID NO: 6192 - RNA, 19 nt, Artificial Sequence
  synthetic
uuuuugagaauaaaucaga

SEQ ID NO: 6193 - RNA, 19 nt, Artificial Sequence
  synthetic
uuuugagaauaaaucagaa

SEQ ID NO: 6194 - RNA, 19 nt, Artificial Sequence
  synthetic
uuugagaauaaaucagaag

SEQ ID NO: 6195 - RNA, 19 nt, Artificial Sequence
  synthetic
uugagaauaaaucagaagc

SEQ ID NO: 6196 - RNA, 19 nt, Artificial Sequence
  synthetic
ugagaauaaaucagaagca

SEQ ID NO: 6197 - RNA, 19 nt, Artificial Sequence
  synthetic
gagaauaaaucagaagcau

SEQ ID NO: 6198 - RNA, 19 nt, Artificial Sequence
  synthetic
agaauaaaucagaagcaug

SEQ ID NO: 6199 - RNA, 19 nt, Artificial Sequence
  synthetic
gaauaaaucagaagcaugg

SEQ ID NO: 6200 - RNA, 19 nt, Artificial Sequence
  synthetic
aauaaaucagaagcauggc

SEQ ID NO: 6201 - RNA, 19 nt, Artificial Sequence
  synthetic
auaaaucagaagcauggcc

SEQ ID NO: 6202 - RNA, 19 nt, Artificial Sequence
  synthetic
uaaaucagaagcauggccc

SEQ ID NO: 6203 - RNA, 19 nt, Artificial Sequence
  synthetic
aaaucagaagcauggccca

SEQ ID NO: 6204 - RNA, 19 nt, Artificial Sequence
  synthetic
aaucagaagcauggcccau

SEQ ID NO: 6205 - RNA, 19 nt, Artificial Sequence
  synthetic
aucagaagcauggcccauu

SEQ ID NO: 6206 - RNA, 19 nt, Artificial Sequence
  synthetic
ucagaagcauggcccauug

SEQ ID NO: 6207 - RNA, 19 nt, Artificial Sequence
  synthetic
cagaagcauggcccauugg

SEQ ID NO: 6208 - RNA, 19 nt, Artificial Sequence
  synthetic
agaagcauggcccauuggg

SEQ ID NO: 6209 - RNA, 19 nt, Artificial Sequence
  synthetic
gaagcauggcccauugggg

SEQ ID NO: 6210 - RNA, 19 nt, Artificial Sequence
  synthetic
aagcauggcccauugggga

SEQ ID NO: 6211 - RNA, 19 nt, Artificial Sequence
  synthetic
agcauggcccauuggggag

SEQ ID NO: 6212 - RNA, 19 nt, Artificial Sequence
  synthetic
gcauggcccauuggggagu

SEQ ID NO: 6213 - RNA, 19 nt, Artificial Sequence
  synthetic
cauggcccauuggggaguc

SEQ ID NO: 6214 - RNA, 19 nt, Artificial Sequence
  synthetic
gucccccaagggaguggaa

SEQ ID NO: 6215 - RNA, 19 nt, Artificial Sequence
  synthetic
cccaagggaguggaagaag

SEQ ID NO: 6216 - RNA, 19 nt, Artificial Sequence
  synthetic
ccaagggaguggaagaagg

SEQ ID NO: 6217 - RNA, 19 nt, Artificial Sequence
  synthetic
agaaggcuccauugggaaa

SEQ ID NO: 6218 - RNA, 19 nt, Artificial Sequence
  synthetic
uccauugggaaagucugua

SEQ ID NO: 6219 - RNA, 19 nt, Artificial Sequence
  synthetic
ccauugggaaagucuguag

SEQ ID NO: 6220 - RNA, 19 nt, Artificial Sequence
  synthetic
cauugggaaagucuguagg

SEQ ID NO: 6221 - RNA, 19 nt, Artificial Sequence
  synthetic
auugggaaagucuguagga

SEQ ID NO: 6222 - RNA, 19 nt, Artificial Sequence
  synthetic
uugggaaagucuguaggac

SEQ ID NO: 6223 - RNA, 19 nt, Artificial Sequence
  synthetic
ugggaaagucuguaggacu

SEQ ID NO: 6224 - RNA, 19 nt, Artificial Sequence
  synthetic
agucuguaggacuuuguug

SEQ ID NO: 6225 - RNA, 19 nt, Artificial Sequence
  synthetic
ggcuaagucgguguucaau

SEQ ID NO: 6226 - RNA, 19 nt, Artificial Sequence
  synthetic
guguucaauagccuguaug

SEQ ID NO: 6227 - RNA, 19 nt, Artificial Sequence
  synthetic
uguucaauagccuguaugc

SEQ ID NO: 6228 - RNA, 19 nt, Artificial Sequence
  synthetic
guucaauagccuguaugca

SEQ ID NO: 6229 - RNA, 19 nt, Artificial Sequence
  synthetic
uucaauagccuguaugcau

SEQ ID NO: 6230 - RNA, 19 nt, Artificial Sequence
  synthetic
ucaauagccuguaugcauc

SEQ ID NO: 6231 - RNA, 19 nt, Artificial Sequence
  synthetic
uagccuguaugcaucucca

SEQ ID NO: 6232 - RNA, 19 nt, Artificial Sequence
  synthetic
acaauuagaaggauuuuca

SEQ ID NO: 6233 - RNA, 19 nt, Artificial Sequence
  synthetic
uuuucagcggagucaagaa

SEQ ID NO: 6234 - RNA, 19 nt, Artificial Sequence
  synthetic
uuucagcggagucaagaaa

SEQ ID NO: 6235 - RNA, 19 nt, Artificial Sequence
  synthetic
uucagcggagucaagaaaa

SEQ ID NO: 6236 - RNA, 19 nt, Artificial Sequence
  synthetic
ucagcggagucaagaaaac

SEQ ID NO: 6237 - RNA, 19 nt, Artificial Sequence
  synthetic
cagcggagucaagaaaacu

SEQ ID NO: 6238 - RNA, 19 nt, Artificial Sequence
  synthetic
agcggagucaagaaaacug

SEQ ID NO: 6239 - RNA, 19 nt, Artificial Sequence
  synthetic
gcggagucaagaaaacugc

SEQ ID NO: 6240 - RNA, 19 nt, Artificial Sequence
  synthetic
cggagucaagaaaacugcu

SEQ ID NO: 6241 - RNA, 19 nt, Artificial Sequence
  synthetic
gcuccuuguuguucaggcu

SEQ ID NO: 6242 - RNA, 19 nt, Artificial Sequence
  synthetic
cuuguuguucaggcucuua

SEQ ID NO: 6243 - RNA, 19 nt, Artificial Sequence
  synthetic
uuguuguucaggcucuuag

SEQ ID NO: 6244 - RNA, 19 nt, Artificial Sequence
  synthetic
uguuguucaggcucuuagg

SEQ ID NO: 6245 - RNA, 19 nt, Artificial Sequence
  synthetic
guuguucaggcucuuaggg

SEQ ID NO: 6246 - RNA, 19 nt, Artificial Sequence
  synthetic
uuguucaggcucuuaggga

SEQ ID NO: 6247 - RNA, 19 nt, Artificial Sequence
  synthetic
uguucaggcucuuagggac

SEQ ID NO: 6248 - RNA, 19 nt, Artificial Sequence
  synthetic
guucaggcucuuagggaca

SEQ ID NO: 6249 - RNA, 19 nt, Artificial Sequence
  synthetic
uucaggcucuuagggacaa

SEQ ID NO: 6250 - RNA, 19 nt, Artificial Sequence
  synthetic
ucaggcucuuagggacaac

SEQ ID NO: 6251 - RNA, 19 nt, Artificial Sequence
  synthetic
caggcucuuagggacaacc

SEQ ID NO: 6252 - RNA, 19 nt, Artificial Sequence
  synthetic
aggcucuuagggacaaccu

SEQ ID NO: 6253 - RNA, 19 nt, Artificial Sequence
  synthetic
ggcucuuagggacaaccuc

SEQ ID NO: 6254 - RNA, 19 nt, Artificial Sequence
  synthetic
gcucuuagggacaaccucg

SEQ ID NO: 6255 - RNA, 19 nt, Artificial Sequence
  synthetic
cucuuagggacaaccucga

SEQ ID NO: 6256 - RNA, 19 nt, Artificial Sequence
  synthetic
ucuuagggacaaccucgaa

SEQ ID NO: 6257 - RNA, 19 nt, Artificial Sequence
  synthetic
cuuagggacaaccucgaac

SEQ ID NO: 6258 - RNA, 19 nt, Artificial Sequence
  synthetic
uuagggacaaccucgaacc

SEQ ID NO: 6259 - RNA, 19 nt, Artificial Sequence
  synthetic
uagggacaaccucgaaccu

SEQ ID NO: 6260 - RNA, 19 nt, Artificial Sequence
  synthetic
agggacaaccucgaaccug

SEQ ID NO: 6261 - RNA, 19 nt, Artificial Sequence
  synthetic
gggacaaccucgaaccugg

SEQ ID NO: 6262 - RNA, 19 nt, Artificial Sequence
  synthetic
ggacaaccucgaaccuggg

SEQ ID NO: 6263 - RNA, 19 nt, Artificial Sequence
  synthetic
gacaaccucgaaccuggga

SEQ ID NO: 6264 - RNA, 19 nt, Artificial Sequence
  synthetic
acaaccucgaaccugggac

SEQ ID NO: 6265 - RNA, 19 nt, Artificial Sequence
  synthetic
cucgaaccugggaccuuug

SEQ ID NO: 6266 - RNA, 19 nt, Artificial Sequence
  synthetic
ucgaaccugggaccuuuga

SEQ ID NO: 6267 - RNA, 19 nt, Artificial Sequence
  synthetic
cgaaccugggaccuuugau

SEQ ID NO: 6268 - RNA, 19 nt, Artificial Sequence
  synthetic
gaaccugggaccuuugauc

SEQ ID NO: 6269 - RNA, 19 nt, Artificial Sequence
  synthetic
aaccugggaccuuugaucu

SEQ ID NO: 6270 - RNA, 19 nt, Artificial Sequence
  synthetic
accugggaccuuugaucuu

SEQ ID NO: 6271 - RNA, 19 nt, Artificial Sequence
  synthetic
uggggggcuauaugaagca

SEQ ID NO: 6272 - RNA, 19 nt, Artificial Sequence
  synthetic
ggggggcuauaugaagcaa

SEQ ID NO: 6273 - RNA, 19 nt, Artificial Sequence
  synthetic
gggggcuauaugaagcaau

SEQ ID NO: 6274 - RNA, 19 nt, Artificial Sequence
  synthetic
ggggcuauaugaagcaauu

SEQ ID NO: 6275 - RNA, 19 nt, Artificial Sequence
  synthetic
gggcuauaugaagcaauug

SEQ ID NO: 6276 - RNA, 19 nt, Artificial Sequence
  synthetic
ggcuauaugaagcaauuga

SEQ ID NO: 6277 - RNA, 19 nt, Artificial Sequence
  synthetic
gcuauaugaagcaauugag

SEQ ID NO: 6278 - RNA, 19 nt, Artificial Sequence
  synthetic
cuauaugaagcaauugagg

SEQ ID NO: 6279 - RNA, 19 nt, Artificial Sequence
  synthetic
uauaugaagcaauugagga

SEQ ID NO: 6280 - RNA, 19 nt, Artificial Sequence
  synthetic
auaugaagcaauugaggag

SEQ ID NO: 6281 - RNA, 19 nt, Artificial Sequence
  synthetic
uaugaagcaauugaggagu

SEQ ID NO: 6282 - RNA, 19 nt, Artificial Sequence
  synthetic
augaagcaauugaggagug

SEQ ID NO: 6283 - RNA, 19 nt, Artificial Sequence
  synthetic
ugaagcaauugaggagugc

SEQ ID NO: 6284 - RNA, 19 nt, Artificial Sequence
  synthetic
gaagcaauugaggagugcc

SEQ ID NO: 6285 - RNA, 19 nt, Artificial Sequence
  synthetic
aagcaauugaggagugccu

SEQ ID NO: 6286 - RNA, 19 nt, Artificial Sequence
  synthetic
agcaauugaggagugccug

SEQ ID NO: 6287 - RNA, 19 nt, Artificial Sequence
  synthetic
gcaauugaggagugccuga

SEQ ID NO: 6288 - RNA, 19 nt, Artificial Sequence
  synthetic
caauugaggagugccugau

SEQ ID NO: 6289 - RNA, 19 nt, Artificial Sequence
  synthetic
aauugaggagugccugauu

SEQ ID NO: 6290 - RNA, 19 nt, Artificial Sequence
  synthetic
auugaggagugccugauua

SEQ ID NO: 6291 - RNA, 19 nt, Artificial Sequence
  synthetic
uugaggagugccugauuaa

SEQ ID NO: 6292 - RNA, 19 nt, Artificial Sequence
  synthetic
ugaggagugccugauuaau

SEQ ID NO: 6293 - RNA, 19 nt, Artificial Sequence
  synthetic
gaggagugccugauuaaug

SEQ ID NO: 6294 - RNA, 19 nt, Artificial Sequence
  synthetic
aggagugccugauuaauga

SEQ ID NO: 6295 - RNA, 19 nt, Artificial Sequence
  synthetic
ggagugccugauuaaugau

SEQ ID NO: 6296 - RNA, 19 nt, Artificial Sequence
  synthetic
gagugccugauuaaugauc

SEQ ID NO: 6297 - RNA, 19 nt, Artificial Sequence
  synthetic
agugccugauuaaugaucc

SEQ ID NO: 6298 - RNA, 19 nt, Artificial Sequence
  synthetic
gugccugauuaaugauccc

SEQ ID NO: 6299 - RNA, 19 nt, Artificial Sequence
  synthetic
ugccugauuaaugaucccu

SEQ ID NO: 6300 - RNA, 19 nt, Artificial Sequence
  synthetic
gccugauuaaugaucccug

SEQ ID NO: 6301 - RNA, 19 nt, Artificial Sequence
  synthetic
ccugauuaaugaucccugg

SEQ ID NO: 6302 - RNA, 19 nt, Artificial Sequence
  synthetic
cugauuaaugaucccuggg

SEQ ID NO: 6303 - RNA, 19 nt, Artificial Sequence
  synthetic
ugauuaaugaucccugggu

SEQ ID NO: 6304 - RNA, 19 nt, Artificial Sequence
  synthetic
gauuaaugaucccuggguu

SEQ ID NO: 6305 - RNA, 19 nt, Artificial Sequence
  synthetic
auuaaugaucccuggguuu

SEQ ID NO: 6306 - RNA, 19 nt, Artificial Sequence
  synthetic
uuaaugaucccuggguuuu

SEQ ID NO: 6307 - RNA, 19 nt, Artificial Sequence
  synthetic
uaaugaucccuggguuuug

SEQ ID NO: 6308 - RNA, 19 nt, Artificial Sequence
  synthetic
aaugaucccuggguuuugc

SEQ ID NO: 6309 - RNA, 19 nt, Artificial Sequence
  synthetic
augaucccuggguuuugcu

SEQ ID NO: 6310 - RNA, 19 nt, Artificial Sequence
  synthetic
ugaucccuggguuuugcuc

SEQ ID NO: 6311 - RNA, 19 nt, Artificial Sequence
  synthetic
gaucccuggguuuugcuca

SEQ ID NO: 6312 - RNA, 19 nt, Artificial Sequence
  synthetic
aucccuggguuuugcucaa

SEQ ID NO: 6313 - RNA, 19 nt, Artificial Sequence
  synthetic
ucccuggguuuugcucaau

SEQ ID NO: 6314 - RNA, 19 nt, Artificial Sequence
  synthetic
cccuggguuuugcucaaug

SEQ ID NO: 6315 - RNA, 19 nt, Artificial Sequence
  synthetic
ccuggguuuugcucaaugc

SEQ ID NO: 6316 - RNA, 19 nt, Artificial Sequence
  synthetic
gcucaaugcgucuugguuc

SEQ ID NO: 6317 - RNA, 19 nt, Artificial Sequence
  synthetic
ucuugguucaacuccuucc

SEQ ID NO: 6318 - RNA, 19 nt, Artificial Sequence
  synthetic
cuugguucaacuccuuccu

SEQ ID NO: 6319 - RNA, 19 nt, Artificial Sequence
  synthetic
uugguucaacuccuuccug

SEQ ID NO: 6320 - RNA, 19 nt, Artificial Sequence
  synthetic
ugguucaacuccuuccuga

SEQ ID NO: 6321 - RNA, 19 nt, Artificial Sequence
  synthetic
gguucaacuccuuccugac

SEQ ID NO: 6322 - RNA, 19 nt, Artificial Sequence
  synthetic
guucaacuccuuccugaca

SEQ ID NO: 6323 - RNA, 19 nt, Artificial Sequence
  synthetic
uucaacuccuuccugacac

SEQ ID NO: 6324 - RNA, 19 nt, Artificial Sequence
  synthetic
ucaacuccuuccugacaca

SEQ ID NO: 6325 - RNA, 19 nt, Artificial Sequence
  synthetic
caacuccuuccugacacau

SEQ ID NO: 6326 - RNA, 19 nt, Artificial Sequence
  synthetic
aacuccuuccugacacaug

SEQ ID NO: 6327 - RNA, 19 nt, Artificial Sequence
  synthetic
acuccuuccugacacaugc

SEQ ID NO: 6328 - RNA, 19 nt, Artificial Sequence
  synthetic
cuccuuccugacacaugca

SEQ ID NO: 6329 - RNA, 19 nt, Artificial Sequence
  synthetic
uccuuccugacacaugcau

SEQ ID NO: 6330 - RNA, 19 nt, Artificial Sequence
  synthetic
ccuuccugacacaugcauu

SEQ ID NO: 6331 - RNA, 19 nt, Artificial Sequence
  synthetic
cuuccugacacaugcauua

SEQ ID NO: 6332 - RNA, 19 nt, Artificial Sequence
  synthetic
uuccugacacaugcauuaa

SEQ ID NO: 6333 - RNA, 19 nt, Artificial Sequence
  synthetic
uccugacacaugcauuaaa

SEQ ID NO: 6334 - RNA, 19 nt, Artificial Sequence
  synthetic
ccugacacaugcauuaaaa

SEQ ID NO: 6335 - RNA, 19 nt, Artificial Sequence
  synthetic
cugacacaugcauuaaaau

SEQ ID NO: 6336 - RNA, 19 nt, Artificial Sequence
  synthetic
ugacacaugcauuaaaaua

SEQ ID NO: 6337 - RNA, 19 nt, Artificial Sequence
  synthetic
gacacaugcauuaaaauag

SEQ ID NO: 6338 - RNA, 19 nt, Artificial Sequence
  synthetic
acacaugcauuaaaauagu

SEQ ID NO: 6339 - RNA, 19 nt, Artificial Sequence
  synthetic
cacaugcauuaaaauaguu

SEQ ID NO: 6340 - RNA, 19 nt, Artificial Sequence
  synthetic
ugcauuaaaauaguuaugg

SEQ ID NO: 6341 - RNA, 19 nt, Artificial Sequence
  synthetic
gcagugcuacuauuuguua

SEQ ID NO: 6342 - RNA, 19 nt, Artificial Sequence
  synthetic
auccguacuguccaaaaaa

SEQ ID NO: 6343 - RNA, 19 nt, Artificial Sequence
  synthetic
ccuuguucauugaugaaau

SEQ ID NO: 6344 - RNA, 19 nt, Artificial Sequence
  synthetic
gugucaggaaggaguugaa

SEQ ID NO: 6345 - RNA, 19 nt, Artificial Sequence
  synthetic
gucgcacaaaaucuuccau

SEQ ID NO: 6346 - RNA, 19 nt, Artificial Sequence
  synthetic
guccauugcugcacaggau

SEQ ID NO: 6347 - RNA, 19 nt, Artificial Sequence
  synthetic
ccugagauuucaaauuuuu

SEQ ID NO: 6348 - RNA, 19 nt, Artificial Sequence
  synthetic
ggucuucaaugcucaauuu

SEQ ID NO: 6349 - RNA, 19 nt, Artificial Sequence
  synthetic
gggucuucaaugcucaauu

SEQ ID NO: 6350 - RNA, 19 nt, Artificial Sequence
  synthetic
ccguucgguucgaauccau

SEQ ID NO: 6351 - RNA, 19 nt, Artificial Sequence
  synthetic
gaaucaguaccugcuuuug

SEQ ID NO: 6352 - RNA, 19 nt, Artificial Sequence
  synthetic
cacaaaaucuuccauuucg

SEQ ID NO: 6353 - RNA, 19 nt, Artificial Sequence
  synthetic
cgcacaaaaucuuccauuu

SEQ ID NO: 6354 - RNA, 19 nt, Artificial Sequence
  synthetic
ucgcacaaaaucuuccauu

SEQ ID NO: 6355 - RNA, 19 nt, Artificial Sequence
  synthetic
gucgcacaaaaucuuccau

SEQ ID NO: 6356 - RNA, 19 nt, Artificial Sequence
  synthetic
ugucgcacaaaaucuucca

SEQ ID NO: 6357 - RNA, 19 nt, Artificial Sequence
  synthetic
uugucgcacaaaaucuucc

SEQ ID NO: 6358 - RNA, 19 nt, Artificial Sequence
  synthetic
auugucgcacaaaaucuuc

SEQ ID NO: 6359 - RNA, 19 nt, Artificial Sequence
  synthetic
cauugucgcacaaaaucuu

SEQ ID NO: 6360 - RNA, 19 nt, Artificial Sequence
  synthetic
gcauugucgcacaaaaucu

SEQ ID NO: 6361 - RNA, 19 nt, Artificial Sequence
  synthetic
agcauugucgcacaaaauc

SEQ ID NO: 6362 - RNA, 19 nt, Artificial Sequence
  synthetic
aagcauugucgcacaaaau

SEQ ID NO: 6363 - RNA, 19 nt, Artificial Sequence
  synthetic
gaagcauugucgcacaaaa

SEQ ID NO: 6364 - RNA, 19 nt, Artificial Sequence
  synthetic
ugaagcauugucgcacaaa

SEQ ID NO: 6365 - RNA, 19 nt, Artificial Sequence
  synthetic
uugaagcauugucgcacaa

SEQ ID NO: 6366 - RNA, 19 nt, Artificial Sequence
  synthetic
guugaagcauugucgcaca

SEQ ID NO: 6367 - RNA, 19 nt, Artificial Sequence
  synthetic
gguugaagcauugucgcac

SEQ ID NO: 6368 - RNA, 19 nt, Artificial Sequence
  synthetic
ggguugaagcauugucgca

SEQ ID NO: 6369 - RNA, 19 nt, Artificial Sequence
  synthetic
cggguugaagcauugucgc

SEQ ID NO: 6370 - RNA, 19 nt, Artificial Sequence
  synthetic
ucggguugaagcauugucg

SEQ ID NO: 6371 - RNA, 19 nt, Artificial Sequence
  synthetic
aucggguugaagcauuguc

SEQ ID NO: 6372 - RNA, 19 nt, Artificial Sequence
  synthetic
caucggguugaagcauugu

SEQ ID NO: 6373 - RNA, 19 nt, Artificial Sequence
  synthetic
ucaucggguugaagcauug

SEQ ID NO: 6374 - RNA, 19 nt, Artificial Sequence
  synthetic
aucaucggguugaagcauu

SEQ ID NO: 6375 - RNA, 19 nt, Artificial Sequence
  synthetic
aaucaucggguugaagcau

SEQ ID NO: 6376 - RNA, 19 nt, Artificial Sequence
  synthetic
caaucaucggguugaagca

SEQ ID NO: 6377 - RNA, 19 nt, Artificial Sequence
  synthetic
acaaucaucggguugaagc

SEQ ID NO: 6378 - RNA, 19 nt, Artificial Sequence
  synthetic
gacaaucaucggguugaag

SEQ ID NO: 6379 - RNA, 19 nt, Artificial Sequence
  synthetic
cgacaaucaucggguugaa

SEQ ID NO: 6380 - RNA, 19 nt, Artificial Sequence
  synthetic
ucgacaaucaucggguuga

SEQ ID NO: 6381 - RNA, 19 nt, Artificial Sequence
  synthetic
uucgacaaucaucggguug

SEQ ID NO: 6382 - RNA, 19 nt, Artificial Sequence
  synthetic
guucgacaaucaucggguu

SEQ ID NO: 6383 - RNA, 19 nt, Artificial Sequence
  synthetic
aguucgacaaucaucgggu

SEQ ID NO: 6384 - RNA, 19 nt, Artificial Sequence
  synthetic
aaguucgacaaucaucggg

SEQ ID NO: 6385 - RNA, 19 nt, Artificial Sequence
  synthetic
caaguucgacaaucaucgg

SEQ ID NO: 6386 - RNA, 19 nt, Artificial Sequence
  synthetic
gcaaguucgacaaucaucg

SEQ ID NO: 6387 - RNA, 19 nt, Artificial Sequence
  synthetic
ugcaaguucgacaaucauc

SEQ ID NO: 6388 - RNA, 19 nt, Artificial Sequence
  synthetic
cugcaaguucgacaaucau

SEQ ID NO: 6389 - RNA, 19 nt, Artificial Sequence
  synthetic
ucugcaaguucgacaauca

SEQ ID NO: 6390 - RNA, 19 nt, Artificial Sequence
  synthetic
uucugcaaguucgacaauc

SEQ ID NO: 6391 - RNA, 19 nt, Artificial Sequence
  synthetic
uuucugcaaguucgacaau

SEQ ID NO: 6392 - RNA, 19 nt, Artificial Sequence
  synthetic
uuuucugcaaguucgacaa

SEQ ID NO: 6393 - RNA, 19 nt, Artificial Sequence
  synthetic
uuuuucugcaaguucgaca

SEQ ID NO: 6394 - RNA, 19 nt, Artificial Sequence
  synthetic
cuuuuucugcaaguucgac

SEQ ID NO: 6395 - RNA, 19 nt, Artificial Sequence
  synthetic
gcuuuuucugcaaguucga

SEQ ID NO: 6396 - RNA, 19 nt, Artificial Sequence
  synthetic
ugcuuuuucugcaaguucg

SEQ ID NO: 6397 - RNA, 19 nt, Artificial Sequence
  synthetic
uugcuuuuucugcaaguuc

SEQ ID NO: 6398 - RNA, 19 nt, Artificial Sequence
  synthetic
auugcuuuuucugcaaguu

SEQ ID NO: 6399 - RNA, 19 nt, Artificial Sequence
  synthetic
cauugcuuuuucugcaagu

SEQ ID NO: 6400 - RNA, 19 nt, Artificial Sequence
  synthetic
ucauugcuuuuucugcaag

SEQ ID NO: 6401 - RNA, 19 nt, Artificial Sequence
  synthetic
uucauugcuuuuucugcaa

SEQ ID NO: 6402 - RNA, 19 nt, Artificial Sequence
  synthetic
uuucauugcuuuuucugca

SEQ ID NO: 6403 - RNA, 19 nt, Artificial Sequence
  synthetic
cuuucauugcuuuuucugc

SEQ ID NO: 6404 - RNA, 19 nt, Artificial Sequence
  synthetic
ucuuucauugcuuuuucug

SEQ ID NO: 6405 - RNA, 19 nt, Artificial Sequence
  synthetic
cucuuucauugcuuuuucu

SEQ ID NO: 6406 - RNA, 19 nt, Artificial Sequence
  synthetic
acucuuucauugcuuuuuc

SEQ ID NO: 6407 - RNA, 19 nt, Artificial Sequence
  synthetic
uacucuuucauugcuuuuu

SEQ ID NO: 6408 - RNA, 19 nt, Artificial Sequence
  synthetic
auacucuuucauugcuuuu

SEQ ID NO: 6409 - RNA, 19 nt, Artificial Sequence
  synthetic
cauacucuuucauugcuuu

SEQ ID NO: 6410 - RNA, 19 nt, Artificial Sequence
  synthetic
ccauacucuuucauugcuu

SEQ ID NO: 6411 - RNA, 19 nt, Artificial Sequence
  synthetic
uccauacucuuucauugcu

SEQ ID NO: 6412 - RNA, 19 nt, Artificial Sequence
  synthetic
cuccauacucuuucauugc

SEQ ID NO: 6413 - RNA, 19 nt, Artificial Sequence
  synthetic
ucuccauacucuuucauug

SEQ ID NO: 6414 - RNA, 19 nt, Artificial Sequence
  synthetic
cucuccauacucuuucauu

SEQ ID NO: 6415 - RNA, 19 nt, Artificial Sequence
  synthetic
uuucagauccucuccauac

SEQ ID NO: 6416 - RNA, 19 nt, Artificial Sequence
  synthetic
auuuguuuguuucaauuuu

SEQ ID NO: 6417 - RNA, 19 nt, Artificial Sequence
  synthetic
aauuuguuuguuucaauuu

SEQ ID NO: 6418 - RNA, 19 nt, Artificial Sequence
  synthetic
aaauuuguuuguuucaauu

SEQ ID NO: 6419 - RNA, 19 nt, Artificial Sequence
  synthetic
caaauuuguuuguuucaau

SEQ ID NO: 6420 - RNA, 19 nt, Artificial Sequence
  synthetic
gcaaauuuguuuguuucaa

SEQ ID NO: 6421 - RNA, 19 nt, Artificial Sequence
  synthetic
ugcaaauuuguuuguuuca

SEQ ID NO: 6422 - RNA, 19 nt, Artificial Sequence
  synthetic
cugcaaauuuguuuguuuc

SEQ ID NO: 6423 - RNA, 19 nt, Artificial Sequence
  synthetic
gcugcaaauuuguuuguuu

SEQ ID NO: 6424 - RNA, 19 nt, Artificial Sequence
  synthetic
ugcugcaaauuuguuuguu

SEQ ID NO: 6425 - RNA, 19 nt, Artificial Sequence
  synthetic
uugcugcaaauuuguuugu

SEQ ID NO: 6426 - RNA, 19 nt, Artificial Sequence
  synthetic
auugcugcaaauuuguuug

SEQ ID NO: 6427 - RNA, 19 nt, Artificial Sequence
  synthetic
uauugcugcaaauuuguuu

SEQ ID NO: 6428 - RNA, 19 nt, Artificial Sequence
  synthetic
auauugcugcaaauuuguu

SEQ ID NO: 6429 - RNA, 19 nt, Artificial Sequence
  synthetic
cauauugcugcaaauuugu

SEQ ID NO: 6430 - RNA, 19 nt, Artificial Sequence
  synthetic
gcauauugcugcaaauuug

SEQ ID NO: 6431 - RNA, 19 nt, Artificial Sequence
  synthetic
ugcauauugcugcaaauuu

SEQ ID NO: 6432 - RNA, 19 nt, Artificial Sequence
  synthetic
gugcauauugcugcaaauu

SEQ ID NO: 6433 - RNA, 19 nt, Artificial Sequence
  synthetic
gugagugcauauugcugca

SEQ ID NO: 6434 - RNA, 19 nt, Artificial Sequence
  synthetic
caugaaacauaccuccaag

SEQ ID NO: 6435 - RNA, 19 nt, Artificial Sequence
  synthetic
uacaugaaacauaccucca

SEQ ID NO: 6436 - RNA, 19 nt, Artificial Sequence
  synthetic
auacaugaaacauaccucc

SEQ ID NO: 6437 - RNA, 19 nt, Artificial Sequence
  synthetic
aauacaugaaacauaccuc

SEQ ID NO: 6438 - RNA, 19 nt, Artificial Sequence
  synthetic
gaauacaugaaacauaccu

SEQ ID NO: 6439 - RNA, 19 nt, Artificial Sequence
  synthetic
ugaauacaugaaacauacc

SEQ ID NO: 6440 - RNA, 19 nt, Artificial Sequence
  synthetic
cugaauacaugaaacauac

SEQ ID NO: 6441 - RNA, 19 nt, Artificial Sequence
  synthetic
ucugaauacaugaaacaua

SEQ ID NO: 6442 - RNA, 19 nt, Artificial Sequence
  synthetic
aucugaauacaugaaacau

SEQ ID NO: 6443 - RNA, 19 nt, Artificial Sequence
  synthetic
aaucugaauacaugaaaca

SEQ ID NO: 6444 - RNA, 19 nt, Artificial Sequence
  synthetic
aaaucugaauacaugaaac

SEQ ID NO: 6445 - RNA, 19 nt, Artificial Sequence
  synthetic
aaaaucugaauacaugaaa

SEQ ID NO: 6446 - RNA, 19 nt, Artificial Sequence
  synthetic
gaaaaucugaauacaugaa

SEQ ID NO: 6447 - RNA, 19 nt, Artificial Sequence
  synthetic
ugaaaaucugaauacauga

SEQ ID NO: 6448 - RNA, 19 nt, Artificial Sequence
  synthetic
augaaaaucugaauacaug

SEQ ID NO: 6449 - RNA, 19 nt, Artificial Sequence
  synthetic
aaugaaaaucugaauacau

SEQ ID NO: 6450 - RNA, 19 nt, Artificial Sequence
  synthetic
aaaugaaaaucugaauaca

SEQ ID NO: 6451 - RNA, 19 nt, Artificial Sequence
  synthetic
gaaaugaaaaucugaauac

SEQ ID NO: 6452 - RNA, 19 nt, Artificial Sequence
  synthetic
ugaaaugaaaaucugaaua

SEQ ID NO: 6453 - RNA, 19 nt, Artificial Sequence
  synthetic
augaaaugaaaaucugaau

SEQ ID NO: 6454 - RNA, 19 nt, Artificial Sequence
  synthetic
gaugaaaugaaaaucugaa

SEQ ID NO: 6455 - RNA, 19 nt, Artificial Sequence
  synthetic
ugaugaaaugaaaaucuga

SEQ ID NO: 6456 - RNA, 19 nt, Artificial Sequence
  synthetic
uugaugaaaugaaaaucug

SEQ ID NO: 6457 - RNA, 19 nt, Artificial Sequence
  synthetic
auugaugaaaugaaaaucu

SEQ ID NO: 6458 - RNA, 19 nt, Artificial Sequence
  synthetic
cauugaugaaaugaaaauc

SEQ ID NO: 6459 - RNA, 19 nt, Artificial Sequence
  synthetic
ucauugaugaaaugaaaau

SEQ ID NO: 6460 - RNA, 19 nt, Artificial Sequence
  synthetic
uucauugaugaaaugaaaa

SEQ ID NO: 6461 - RNA, 19 nt, Artificial Sequence
  synthetic
guucauugaugaaaugaaa

SEQ ID NO: 6462 - RNA, 19 nt, Artificial Sequence
  synthetic
uguucauugaugaaaugaa

SEQ ID NO: 6463 - RNA, 19 nt, Artificial Sequence
  synthetic
uuguucauugaugaaauga

SEQ ID NO: 6464 - RNA, 19 nt, Artificial Sequence
  synthetic
cuuguucauugaugaaaug

SEQ ID NO: 6465 - RNA, 19 nt, Artificial Sequence
  synthetic
ccuuguucauugaugaaau

SEQ ID NO: 6466 - RNA, 19 nt, Artificial Sequence
  synthetic
gccuuguucauugaugaaa

SEQ ID NO: 6467 - RNA, 19 nt, Artificial Sequence
  synthetic
cgccuuguucauugaugaa

SEQ ID NO: 6468 - RNA, 19 nt, Artificial Sequence
  synthetic
ucgccuuguucauugauga

SEQ ID NO: 6469 - RNA, 19 nt, Artificial Sequence
  synthetic
uucgccuuguucauugaug

SEQ ID NO: 6470 - RNA, 19 nt, Artificial Sequence
  synthetic
auucgccuuguucauugau

SEQ ID NO: 6471 - RNA, 19 nt, Artificial Sequence
  synthetic
gauucgccuuguucauuga

SEQ ID NO: 6472 - RNA, 19 nt, Artificial Sequence
  synthetic
ugauucgccuuguucauug

SEQ ID NO: 6473 - RNA, 19 nt, Artificial Sequence
  synthetic
uugauucgccuuguucauu

SEQ ID NO: 6474 - RNA, 19 nt, Artificial Sequence
  synthetic
auugauucgccuuguucau

SEQ ID NO: 6475 - RNA, 19 nt, Artificial Sequence
  synthetic
uauugauucgccuuguuca

SEQ ID NO: 6476 - RNA, 19 nt, Artificial Sequence
  synthetic
aaguucuaccacuauugau

SEQ ID NO: 6477 - RNA, 19 nt, Artificial Sequence
  synthetic
ggaucaucaaguucuacca

SEQ ID NO: 6478 - RNA, 19 nt, Artificial Sequence
  synthetic
uggaucaucaaguucuacc

SEQ ID NO: 6479 - RNA, 19 nt, Artificial Sequence
  synthetic
uuggaucaucaaguucuac

SEQ ID NO: 6480 - RNA, 19 nt, Artificial Sequence
  synthetic
uuuggaucaucaaguucua

SEQ ID NO: 6481 - RNA, 19 nt, Artificial Sequence
  synthetic
auuuggaucaucaaguucu

SEQ ID NO: 6482 - RNA, 19 nt, Artificial Sequence
  synthetic
cauuuggaucaucaaguuc

SEQ ID NO: 6483 - RNA, 19 nt, Artificial Sequence
  synthetic
gcauuuggaucaucaaguu

SEQ ID NO: 6484 - RNA, 19 nt, Artificial Sequence
  synthetic
ugcauuuggaucaucaagu

SEQ ID NO: 6485 - RNA, 19 nt, Artificial Sequence
  synthetic
gugcauuuggaucaucaag

SEQ ID NO: 6486 - RNA, 19 nt, Artificial Sequence
  synthetic
agugcauuuggaucaucaa

SEQ ID NO: 6487 - RNA, 19 nt, Artificial Sequence
  synthetic
cagugcauuuggaucauca

SEQ ID NO: 6488 - RNA, 19 nt, Artificial Sequence
  synthetic
acagugcauuuggaucauc

SEQ ID NO: 6489 - RNA, 19 nt, Artificial Sequence
  synthetic
aacagugcauuuggaucau

SEQ ID NO: 6490 - RNA, 19 nt, Artificial Sequence
  synthetic
uaacagugcauuuggauca

SEQ ID NO: 6491 - RNA, 19 nt, Artificial Sequence
  synthetic
uuaacagugcauuuggauc

SEQ ID NO: 6492 - RNA, 19 nt, Artificial Sequence
  synthetic
uuuaacagugcauuuggau

SEQ ID NO: 6493 - RNA, 19 nt, Artificial Sequence
  synthetic
cuuuaacagugcauuugga

SEQ ID NO: 6494 - RNA, 19 nt, Artificial Sequence
  synthetic
gcuuuaacagugcauuugg

SEQ ID NO: 6495 - RNA, 19 nt, Artificial Sequence
  synthetic
ugcuuuaacagugcauuug

SEQ ID NO: 6496 - RNA, 19 nt, Artificial Sequence
  synthetic
gugcuuuaacagugcauuu

SEQ ID NO: 6497 - RNA, 19 nt, Artificial Sequence
  synthetic
ugugcuuuaacagugcauu

SEQ ID NO: 6498 - RNA, 19 nt, Artificial Sequence
  synthetic
cugugcuuuaacagugcau

SEQ ID NO: 6499 - RNA, 19 nt, Artificial Sequence
  synthetic
ucugugcuuuaacagugca

SEQ ID NO: 6500 - RNA, 19 nt, Artificial Sequence
  synthetic
aucugugcuuuaacagugc

SEQ ID NO: 6501 - RNA, 19 nt, Artificial Sequence
  synthetic
aaucugugcuuuaacagug

SEQ ID NO: 6502 - RNA, 19 nt, Artificial Sequence
  synthetic
aaaucugugcuuuaacagu

SEQ ID NO: 6503 - RNA, 19 nt, Artificial Sequence
  synthetic
caaaucugugcuuuaacag

SEQ ID NO: 6504 - RNA, 19 nt, Artificial Sequence
  synthetic
ucaaaucugugcuuuaaca

SEQ ID NO: 6505 - RNA, 19 nt, Artificial Sequence
  synthetic
uucaaaucugugcuuuaac

SEQ ID NO: 6506 - RNA, 19 nt, Artificial Sequence
  synthetic
uuucaaaucugugcuuuaa

SEQ ID NO: 6507 - RNA, 19 nt, Artificial Sequence
  synthetic
auuucaaaucugugcuuua

SEQ ID NO: 6508 - RNA, 19 nt, Artificial Sequence
  synthetic
uauuucaaaucugugcuuu

SEQ ID NO: 6509 - RNA, 19 nt, Artificial Sequence
  synthetic
uuauuucaaaucugugcuu

SEQ ID NO: 6510 - RNA, 19 nt, Artificial Sequence
  synthetic
auuauuucaaaucugugcu

SEQ ID NO: 6511 - RNA, 19 nt, Artificial Sequence
  synthetic
gauuauuucaaaucugugc

SEQ ID NO: 6512 - RNA, 19 nt, Artificial Sequence
  synthetic
cgauuauuucaaaucugug

SEQ ID NO: 6513 - RNA, 19 nt, Artificial Sequence
  synthetic
ucgauuauuucaaaucugu

SEQ ID NO: 6514 - RNA, 19 nt, Artificial Sequence
  synthetic
cucgauuauuucaaaucug

SEQ ID NO: 6515 - RNA, 19 nt, Artificial Sequence
  synthetic
ccucgauuauuucaaaucu

SEQ ID NO: 6516 - RNA, 19 nt, Artificial Sequence
  synthetic
cccucgauuauuucaaauc

SEQ ID NO: 6517 - RNA, 19 nt, Artificial Sequence
  synthetic
ccccucgauuauuucaaau

SEQ ID NO: 6518 - RNA, 19 nt, Artificial Sequence
  synthetic
uccccucgauuauuucaaa

SEQ ID NO: 6519 - RNA, 19 nt, Artificial Sequence
  synthetic
cuccccucgauuauuucaa

SEQ ID NO: 6520 - RNA, 19 nt, Artificial Sequence
  synthetic
ucuccccucgauuauuuca

SEQ ID NO: 6521 - RNA, 19 nt, Artificial Sequence
  synthetic
cucuccccucgauuauuuc

SEQ ID NO: 6522 - RNA, 19 nt, Artificial Sequence
  synthetic
ucucuccccucgauuauuu

SEQ ID NO: 6523 - RNA, 19 nt, Artificial Sequence
  synthetic
gucucuccccucgauuauu

SEQ ID NO: 6524 - RNA, 19 nt, Artificial Sequence
  synthetic
ugucucuccccucgauuau

SEQ ID NO: 6525 - RNA, 19 nt, Artificial Sequence
  synthetic
cugucucuccccucgauua

SEQ ID NO: 6526 - RNA, 19 nt, Artificial Sequence
  synthetic
ucugucucuccccucgauu

SEQ ID NO: 6527 - RNA, 19 nt, Artificial Sequence
  synthetic
uucugucucuccccucgau

SEQ ID NO: 6528 - RNA, 19 nt, Artificial Sequence
  synthetic
guucugucucuccccucga

SEQ ID NO: 6529 - RNA, 19 nt, Artificial Sequence
  synthetic
uguucugucucuccccucg

SEQ ID NO: 6530 - RNA, 19 nt, Artificial Sequence
  synthetic
uuguucugucucuccccuc

SEQ ID NO: 6531 - RNA, 19 nt, Artificial Sequence
  synthetic
auuguucugucucuccccu

SEQ ID NO: 6532 - RNA, 19 nt, Artificial Sequence
  synthetic
cauuguucugucucucccc

SEQ ID NO: 6533 - RNA, 19 nt, Artificial Sequence
  synthetic
ccauuguucugucucuccc

SEQ ID NO: 6534 - RNA, 19 nt, Artificial Sequence
  synthetic
gccauuguucugucucucc

SEQ ID NO: 6535 - RNA, 19 nt, Artificial Sequence
  synthetic
ggccauuguucugucucuc

SEQ ID NO: 6536 - RNA, 19 nt, Artificial Sequence
  synthetic
aggccauuguucugucucu

SEQ ID NO: 6537 - RNA, 19 nt, Artificial Sequence
  synthetic
caggccauuguucugucuc

SEQ ID NO: 6538 - RNA, 19 nt, Artificial Sequence
  synthetic
ccaggccauuguucugucu

SEQ ID NO: 6539 - RNA, 19 nt, Artificial Sequence
  synthetic
uccaggccauuguucuguc

SEQ ID NO: 6540 - RNA, 19 nt, Artificial Sequence
  synthetic
guccaggccauuguucugu

SEQ ID NO: 6541 - RNA, 19 nt, Artificial Sequence
  synthetic
uguccaggccauuguucug

SEQ ID NO: 6542 - RNA, 19 nt, Artificial Sequence
  synthetic
cuguccaggccauuguucu

SEQ ID NO: 6543 - RNA, 19 nt, Artificial Sequence
  synthetic
acuguccaggccauuguuc

SEQ ID NO: 6544 - RNA, 19 nt, Artificial Sequence
  synthetic
uacuguccaggccauuguu

SEQ ID NO: 6545 - RNA, 19 nt, Artificial Sequence
  synthetic
cuacuguccaggccauugu

SEQ ID NO: 6546 - RNA, 19 nt, Artificial Sequence
  synthetic
acuacuguccaggccauug

SEQ ID NO: 6547 - RNA, 19 nt, Artificial Sequence
  synthetic
uacuacuguccaggccauu

SEQ ID NO: 6548 - RNA, 19 nt, Artificial Sequence
  synthetic
uuacuacuguccaggccau

SEQ ID NO: 6549 - RNA, 19 nt, Artificial Sequence
  synthetic
uuuacuacuguccaggcca

SEQ ID NO: 6550 - RNA, 19 nt, Artificial Sequence
  synthetic
guuuacuacuguccaggcc

SEQ ID NO: 6551 - RNA, 19 nt, Artificial Sequence
  synthetic
uguuuacuacuguccaggc

SEQ ID NO: 6552 - RNA, 19 nt, Artificial Sequence
  synthetic
cuguuuacuacuguccagg

SEQ ID NO: 6553 - RNA, 19 nt, Artificial Sequence
  synthetic
acuguuuacuacuguccag

SEQ ID NO: 6554 - RNA, 19 nt, Artificial Sequence
  synthetic
uacuguuuacuacugucca

SEQ ID NO: 6555 - RNA, 19 nt, Artificial Sequence
  synthetic
auacuguuuacuacugucc

SEQ ID NO: 6556 - RNA, 19 nt, Artificial Sequence
  synthetic
gauacuguuuacuacuguc

SEQ ID NO: 6557 - RNA, 19 nt, Artificial Sequence
  synthetic
agauacuguuuacuacugu

SEQ ID NO: 6558 - RNA, 19 nt, Artificial Sequence
  synthetic
cagauacuguuuacuacug

SEQ ID NO: 6559 - RNA, 19 nt, Artificial Sequence
  synthetic
gcagauacuguuuacuacu

SEQ ID NO: 6560 - RNA, 19 nt, Artificial Sequence
  synthetic
ugcagauacuguuuacuac

SEQ ID NO: 6561 - RNA, 19 nt, Artificial Sequence
  synthetic
uugcagauacuguuuacua

SEQ ID NO: 6562 - RNA, 19 nt, Artificial Sequence
  synthetic
guugcagauacuguuuacu

SEQ ID NO: 6563 - RNA, 19 nt, Artificial Sequence
  synthetic
uguugcagauacuguuuac

SEQ ID NO: 6564 - RNA, 19 nt, Artificial Sequence
  synthetic
guguugcagauacuguuua

SEQ ID NO: 6565 - RNA, 19 nt, Artificial Sequence
  synthetic
aguguugcagauacuguuu

SEQ ID NO: 6566 - RNA, 19 nt, Artificial Sequence
  synthetic
uaguguugcagauacuguu

SEQ ID NO: 6567 - RNA, 19 nt, Artificial Sequence
  synthetic
guaguguugcagauacugu

SEQ ID NO: 6568 - RNA, 19 nt, Artificial Sequence
  synthetic
aguaguguugcagauacug

SEQ ID NO: 6569 - RNA, 19 nt, Artificial Sequence
  synthetic
caguaguguugcagauacu

SEQ ID NO: 6570 - RNA, 19 nt, Artificial Sequence
  synthetic
ccaguaguguugcagauac

SEQ ID NO: 6571 - RNA, 19 nt, Artificial Sequence
  synthetic
uccaguaguguugcagaua

SEQ ID NO: 6572 - RNA, 19 nt, Artificial Sequence
  synthetic
cuccaguaguguugcagau

SEQ ID NO: 6573 - RNA, 19 nt, Artificial Sequence
  synthetic
gcuccaguaguguugcaga

SEQ ID NO: 6574 - RNA, 19 nt, Artificial Sequence
  synthetic
agcuccaguaguguugcag

SEQ ID NO: 6575 - RNA, 19 nt, Artificial Sequence
  synthetic
cagcuccaguaguguugca

SEQ ID NO: 6576 - RNA, 19 nt, Artificial Sequence
  synthetic
ucagcuccaguaguguugc

SEQ ID NO: 6577 - RNA, 19 nt, Artificial Sequence
  synthetic
cucagcuccaguaguguug

SEQ ID NO: 6578 - RNA, 19 nt, Artificial Sequence
  synthetic
ugguagaaacuucgguuuc

SEQ ID NO: 6579 - RNA, 19 nt, Artificial Sequence
  synthetic
cuuguaaucauacaaaucu

SEQ ID NO: 6580 - RNA, 19 nt, Artificial Sequence
  synthetic
ucuccuuguaaucauacaa

SEQ ID NO: 6581 - RNA, 19 nt, Artificial Sequence
  synthetic
uucuccuuguaaucauaca

SEQ ID NO: 6582 - RNA, 19 nt, Artificial Sequence
  synthetic
guucuccuuguaaucauac

SEQ ID NO: 6583 - RNA, 19 nt, Artificial Sequence
  synthetic
uguucuccuuguaaucaua

SEQ ID NO: 6584 - RNA, 19 nt, Artificial Sequence
  synthetic
cuguucuccuuguaaucau

SEQ ID NO: 6585 - RNA, 19 nt, Artificial Sequence
  synthetic
ucuguucuccuuguaauca

SEQ ID NO: 6586 - RNA, 19 nt, Artificial Sequence
  synthetic
aucuguucuccuuguaauc

SEQ ID NO: 6587 - RNA, 19 nt, Artificial Sequence
  synthetic
aaucuguucuccuuguaau

SEQ ID NO: 6588 - RNA, 19 nt, Artificial Sequence
  synthetic
gaaucuguucuccuuguaa

SEQ ID NO: 6589 - RNA, 19 nt, Artificial Sequence
  synthetic
ugaaucuguucuccuugua

SEQ ID NO: 6590 - RNA, 19 nt, Artificial Sequence
  synthetic
augaaucuguucuccuugu

SEQ ID NO: 6591 - RNA, 19 nt, Artificial Sequence
  synthetic
gaugaaucuguucuccuug

SEQ ID NO: 6592 - RNA, 19 nt, Artificial Sequence
  synthetic
cgaugaaucuguucuccuu

SEQ ID NO: 6593 - RNA, 19 nt, Artificial Sequence
  synthetic
ucgaugaaucuguucuccu

SEQ ID NO: 6594 - RNA, 19 nt, Artificial Sequence
  synthetic
uucgaugaaucuguucucc

SEQ ID NO: 6595 - RNA, 19 nt, Artificial Sequence
  synthetic
uuucgaugaaucuguucuc

SEQ ID NO: 6596 - RNA, 19 nt, Artificial Sequence
  synthetic
auuucgaugaaucuguucu

SEQ ID NO: 6597 - RNA, 19 nt, Artificial Sequence
  synthetic
aauuucgaugaaucuguuc

SEQ ID NO: 6598 - RNA, 19 nt, Artificial Sequence
  synthetic
caauuucgaugaaucuguu

SEQ ID NO: 6599 - RNA, 19 nt, Artificial Sequence
  synthetic
ccaauuucgaugaaucugu

SEQ ID NO: 6600 - RNA, 19 nt, Artificial Sequence
  synthetic
uccaauuucgaugaaucug

SEQ ID NO: 6601 - RNA, 19 nt, Artificial Sequence
  synthetic
cuccaauuucgaugaaucu

SEQ ID NO: 6602 - RNA, 19 nt, Artificial Sequence
  synthetic
acuccaauuucgaugaauc

SEQ ID NO: 6603 - RNA, 19 nt, Artificial Sequence
  synthetic
cacuccaauuucgaugaau

SEQ ID NO: 6604 - RNA, 19 nt, Artificial Sequence
  synthetic
ucacuccaauuucgaugaa

SEQ ID NO: 6605 - RNA, 19 nt, Artificial Sequence
  synthetic
gucacuccaauuucgauga

SEQ ID NO: 6606 - RNA, 19 nt, Artificial Sequence
  synthetic
ugucacuccaauuucgaug

SEQ ID NO: 6607 - RNA, 19 nt, Artificial Sequence
  synthetic
uugucacuccaauuucgau

SEQ ID NO: 6608 - RNA, 19 nt, Artificial Sequence
  synthetic
cuugucacuccaauuucga

SEQ ID NO: 6609 - RNA, 19 nt, Artificial Sequence
  synthetic
ucuccuugucacuccaauu

SEQ ID NO: 6610 - RNA, 19 nt, Artificial Sequence
  synthetic
aauauauguggacuucucu

SEQ ID NO: 6611 - RNA, 19 nt, Artificial Sequence
  synthetic
uaauauauguggacuucuc

SEQ ID NO: 6612 - RNA, 19 nt, Artificial Sequence
  synthetic
guaauauauguggacuucu

SEQ ID NO: 6613 - RNA, 19 nt, Artificial Sequence
  synthetic
gguaauauauguggacuuc

SEQ ID NO: 6614 - RNA, 19 nt, Artificial Sequence
  synthetic
agguaauauauguggacuu

SEQ ID NO: 6615 - RNA, 19 nt, Artificial Sequence
  synthetic
aagguaauauauguggacu

SEQ ID NO: 6616 - RNA, 19 nt, Artificial Sequence
  synthetic
caagguaauauauguggac

SEQ ID NO: 6617 - RNA, 19 nt, Artificial Sequence
  synthetic
ucaagguaauauaugugga

SEQ ID NO: 6618 - RNA, 19 nt, Artificial Sequence
  synthetic
uucaagguaauauaugugg

SEQ ID NO: 6619 - RNA, 19 nt, Artificial Sequence
  synthetic
uuucaagguaauauaugug

SEQ ID NO: 6620 - RNA, 19 nt, Artificial Sequence
  synthetic
uuuucaagguaauauaugu

SEQ ID NO: 6621 - RNA, 19 nt, Artificial Sequence
  synthetic
cuuuucaagguaauauaug

SEQ ID NO: 6622 - RNA, 19 nt, Artificial Sequence
  synthetic
ccuuuucaagguaauauau

SEQ ID NO: 6623 - RNA, 19 nt, Artificial Sequence
  synthetic
gccuuuucaagguaauaua

SEQ ID NO: 6624 - RNA, 19 nt, Artificial Sequence
  synthetic
ggccuuuucaagguaauau

SEQ ID NO: 6625 - RNA, 19 nt, Artificial Sequence
  synthetic
uggccuuuucaagguaaua

SEQ ID NO: 6626 - RNA, 19 nt, Artificial Sequence
  synthetic
uuggccuuuucaagguaau

SEQ ID NO: 6627 - RNA, 19 nt, Artificial Sequence
  synthetic
auuggccuuuucaagguaa

SEQ ID NO: 6628 - RNA, 19 nt, Artificial Sequence
  synthetic
uauuggccuuuucaaggua

SEQ ID NO: 6629 - RNA, 19 nt, Artificial Sequence
  synthetic
uuauuggccuuuucaaggu

SEQ ID NO: 6630 - RNA, 19 nt, Artificial Sequence
  synthetic
uuuauuggccuuuucaagg

SEQ ID NO: 6631 - RNA, 19 nt, Artificial Sequence
  synthetic
uuuuauuggccuuuucaag

SEQ ID NO: 6632 - RNA, 19 nt, Artificial Sequence
  synthetic
auuuuauuggccuuuucaa

SEQ ID NO: 6633 - RNA, 19 nt, Artificial Sequence
  synthetic
aauuuuauuggccuuuuca

SEQ ID NO: 6634 - RNA, 19 nt, Artificial Sequence
  synthetic
uaauuuuauuggccuuuuc

SEQ ID NO: 6635 - RNA, 19 nt, Artificial Sequence
  synthetic
uuaauuuuauuggccuuuu

SEQ ID NO: 6636 - RNA, 19 nt, Artificial Sequence
  synthetic
uuuaauuuuauuggccuuu

SEQ ID NO: 6637 - RNA, 19 nt, Artificial Sequence
  synthetic
auuuaauuuuauuggccuu

SEQ ID NO: 6638 - RNA, 19 nt, Artificial Sequence
  synthetic
gauuuaauuuuauuggccu

SEQ ID NO: 6639 - RNA, 19 nt, Artificial Sequence
  synthetic
agauuuaauuuuauuggcc

SEQ ID NO: 6640 - RNA, 19 nt, Artificial Sequence
  synthetic
cagauuuaauuuuauuggc

SEQ ID NO: 6641 - RNA, 19 nt, Artificial Sequence
  synthetic
ucagauuuaauuuuauugg

SEQ ID NO: 6642 - RNA, 19 nt, Artificial Sequence
  synthetic
cucagauuuaauuuuauug

SEQ ID NO: 6643 - RNA, 19 nt, Artificial Sequence
  synthetic
ucucagauuuaauuuuauu

SEQ ID NO: 6644 - RNA, 19 nt, Artificial Sequence
  synthetic
uucucagauuuaauuuuau

SEQ ID NO: 6645 - RNA, 19 nt, Artificial Sequence
  synthetic
uguauucucagauuuaauu

SEQ ID NO: 6646 - RNA, 19 nt, Artificial Sequence
  synthetic
agaaaaugugaaugugugu

SEQ ID NO: 6647 - RNA, 19 nt, Artificial Sequence
  synthetic
gagaaaaugugaaugugug

SEQ ID NO: 6648 - RNA, 19 nt, Artificial Sequence
  synthetic
ugagaaaaugugaaugugu

SEQ ID NO: 6649 - RNA, 19 nt, Artificial Sequence
  synthetic
augagaaaaugugaaugug

SEQ ID NO: 6650 - RNA, 19 nt, Artificial Sequence
  synthetic
aaugagaaaaugugaaugu

SEQ ID NO: 6651 - RNA, 19 nt, Artificial Sequence
  synthetic
gaaugagaaaaugugaaug

SEQ ID NO: 6652 - RNA, 19 nt, Artificial Sequence
  synthetic
ugaaugagaaaaugugaau

SEQ ID NO: 6653 - RNA, 19 nt, Artificial Sequence
  synthetic
gugaaugagaaaaugugaa

SEQ ID NO: 6654 - RNA, 19 nt, Artificial Sequence
  synthetic
agugaaugagaaaauguga

SEQ ID NO: 6655 - RNA, 19 nt, Artificial Sequence
  synthetic
cagugaaugagaaaaugug

SEQ ID NO: 6656 - RNA, 19 nt, Artificial Sequence
  synthetic
ccagugaaugagaaaaugu

SEQ ID NO: 6657 - RNA, 19 nt, Artificial Sequence
  synthetic
cccagugaaugagaaaaug

SEQ ID NO: 6658 - RNA, 19 nt, Artificial Sequence
  synthetic
ccccagugaaugagaaaau

SEQ ID NO: 6659 - RNA, 19 nt, Artificial Sequence
  synthetic
uccccagugaaugagaaaa

SEQ ID NO: 6660 - RNA, 19 nt, Artificial Sequence
  synthetic
cuccccagugaaugagaaa

SEQ ID NO: 6661 - RNA, 19 nt, Artificial Sequence
  synthetic
ccuccccagugaaugagaa

SEQ ID NO: 6662 - RNA, 19 nt, Artificial Sequence
  synthetic
uccuccccagugaaugaga

SEQ ID NO: 6663 - RNA, 19 nt, Artificial Sequence
  synthetic
uuccuccccagugaaugag

SEQ ID NO: 6664 - RNA, 19 nt, Artificial Sequence
  synthetic
uuuccuccccagugaauga

SEQ ID NO: 6665 - RNA, 19 nt, Artificial Sequence
  synthetic
auuuccuccccagugaaug

SEQ ID NO: 6666 - RNA, 19 nt, Artificial Sequence
  synthetic
cauuuccuccccagugaau

SEQ ID NO: 6667 - RNA, 19 nt, Artificial Sequence
  synthetic
ccauuuccuccccagugaa

SEQ ID NO: 6668 - RNA, 19 nt, Artificial Sequence
  synthetic
gccauuuccuccccaguga

SEQ ID NO: 6669 - RNA, 19 nt, Artificial Sequence
  synthetic
ggccauuuccuccccagug

SEQ ID NO: 6670 - RNA, 19 nt, Artificial Sequence
  synthetic
uggccauuuccuccccagu

SEQ ID NO: 6671 - RNA, 19 nt, Artificial Sequence
  synthetic
guggccauuuccuccccag

SEQ ID NO: 6672 - RNA, 19 nt, Artificial Sequence
  synthetic
uguggccauuuccucccca

SEQ ID NO: 6673 - RNA, 19 nt, Artificial Sequence
  synthetic
uuguggccauuuccucccc

SEQ ID NO: 6674 - RNA, 19 nt, Artificial Sequence
  synthetic
uuuguggccauuuccuccc

SEQ ID NO: 6675 - RNA, 19 nt, Artificial Sequence
  synthetic
cuuuguggccauuuccucc

SEQ ID NO: 6676 - RNA, 19 nt, Artificial Sequence
  synthetic
ccuuuguggccauuuccuc

SEQ ID NO: 6677 - RNA, 19 nt, Artificial Sequence
  synthetic
gccuuuguggccauuuccu

SEQ ID NO: 6678 - RNA, 19 nt, Artificial Sequence
  synthetic
ugccuuuguggccauuucc

SEQ ID NO: 6679 - RNA, 19 nt, Artificial Sequence
  synthetic
cugccuuuguggccauuuc

SEQ ID NO: 6680 - RNA, 19 nt, Artificial Sequence
  synthetic
ucugccuuuguggccauuu

SEQ ID NO: 6681 - RNA, 19 nt, Artificial Sequence
  synthetic
gucugccuuuguggccauu

SEQ ID NO: 6682 - RNA, 19 nt, Artificial Sequence
  synthetic
agucugccuuuguggccau

SEQ ID NO: 6683 - RNA, 19 nt, Artificial Sequence
  synthetic
uagucugccuuuguggcca

SEQ ID NO: 6684 - RNA, 19 nt, Artificial Sequence
  synthetic
guagucugccuuuguggcc

SEQ ID NO: 6685 - RNA, 19 nt, Artificial Sequence
  synthetic
uguagucugccuuuguggc

SEQ ID NO: 6686 - RNA, 19 nt, Artificial Sequence
  synthetic
guguagucugccuuugugg

SEQ ID NO: 6687 - RNA, 19 nt, Artificial Sequence
  synthetic
aguguagucugccuuugug

SEQ ID NO: 6688 - RNA, 19 nt, Artificial Sequence
  synthetic
gaguguagucugccuuugu

SEQ ID NO: 6689 - RNA, 19 nt, Artificial Sequence
  synthetic
agaguguagucugccuuug

SEQ ID NO: 6690 - RNA, 19 nt, Artificial Sequence
  synthetic
gagaguguagucugccuuu

SEQ ID NO: 6691 - RNA, 19 nt, Artificial Sequence
  synthetic
cgagaguguagucugccuu

SEQ ID NO: 6692 - RNA, 19 nt, Artificial Sequence
  synthetic
ucgagaguguagucugccu

SEQ ID NO: 6693 - RNA, 19 nt, Artificial Sequence
  synthetic
gucgagaguguagucugcc

SEQ ID NO: 6694 - RNA, 19 nt, Artificial Sequence
  synthetic
cgucgagaguguagucugc

SEQ ID NO: 6695 - RNA, 19 nt, Artificial Sequence
  synthetic
ucgucgagaguguagucug

SEQ ID NO: 6696 - RNA, 19 nt, Artificial Sequence
  synthetic
cucgucgagaguguagucu

SEQ ID NO: 6697 - RNA, 19 nt, Artificial Sequence
  synthetic
ccucgucgagaguguaguc

SEQ ID NO: 6698 - RNA, 19 nt, Artificial Sequence
  synthetic
uccucgucgagaguguagu

SEQ ID NO: 6699 - RNA, 19 nt, Artificial Sequence
  synthetic
uuccucgucgagaguguag

SEQ ID NO: 6700 - RNA, 19 nt, Artificial Sequence
  synthetic
uuuccucgucgagagugua

SEQ ID NO: 6701 - RNA, 19 nt, Artificial Sequence
  synthetic
cuuuccucgucgagagugu

SEQ ID NO: 6702 - RNA, 19 nt, Artificial Sequence
  synthetic
gcuuuccucgucgagagug

SEQ ID NO: 6703 - RNA, 19 nt, Artificial Sequence
  synthetic
ugcuuuccucgucgagagu

SEQ ID NO: 6704 - RNA, 19 nt, Artificial Sequence
  synthetic
cugcuuuccucgucgagag

SEQ ID NO: 6705 - RNA, 19 nt, Artificial Sequence
  synthetic
ccugcuuuccucgucgaga

SEQ ID NO: 6706 - RNA, 19 nt, Artificial Sequence
  synthetic
cccugcuuuccucgucgag

SEQ ID NO: 6707 - RNA, 19 nt, Artificial Sequence
  synthetic
gcccugcuuuccucgucga

SEQ ID NO: 6708 - RNA, 19 nt, Artificial Sequence
  synthetic
agcccugcuuuccucgucg

SEQ ID NO: 6709 - RNA, 19 nt, Artificial Sequence
  synthetic
uagcccugcuuuccucguc

SEQ ID NO: 6710 - RNA, 19 nt, Artificial Sequence
  synthetic
cuagcccugcuuuccucgu

SEQ ID NO: 6711 - RNA, 19 nt, Artificial Sequence
  synthetic
ccuagcccugcuuuccucg

SEQ ID NO: 6712 - RNA, 19 nt, Artificial Sequence
  synthetic
uccuagcccugcuuuccuc

SEQ ID NO: 6713 - RNA, 19 nt, Artificial Sequence
  synthetic
auccuagcccugcuuuccu

SEQ ID NO: 6714 - RNA, 19 nt, Artificial Sequence
  synthetic
aauccuagcccugcuuucc

SEQ ID NO: 6715 - RNA, 19 nt, Artificial Sequence
  synthetic
uaauccuagcccugcuuuc

SEQ ID NO: 6716 - RNA, 19 nt, Artificial Sequence
  synthetic
uuaauccuagcccugcuuu

SEQ ID NO: 6717 - RNA, 19 nt, Artificial Sequence
  synthetic
ggucuuaauccuagcccug

SEQ ID NO: 6718 - RNA, 19 nt, Artificial Sequence
  synthetic
ccuuaugguaaauagccug

SEQ ID NO: 6719 - RNA, 19 nt, Artificial Sequence
  synthetic
ucuguuggccauuucuugc

SEQ ID NO: 6720 - RNA, 19 nt, Artificial Sequence
  synthetic
cucuguuggccauuucuug

SEQ ID NO: 6721 - RNA, 19 nt, Artificial Sequence
  synthetic
ccucuguuggccauuucuu

SEQ ID NO: 6722 - RNA, 19 nt, Artificial Sequence
  synthetic
gccucuguuggccauuucu

SEQ ID NO: 6723 - RNA, 19 nt, Artificial Sequence
  synthetic
ggccucuguuggccauuuc

SEQ ID NO: 6724 - RNA, 19 nt, Artificial Sequence
  synthetic
aggccucuguuggccauuu

SEQ ID NO: 6725 - RNA, 19 nt, Artificial Sequence
  synthetic
gaggccucuguuggccauu

SEQ ID NO: 6726 - RNA, 19 nt, Artificial Sequence
  synthetic
agaggccucuguuggccau

SEQ ID NO: 6727 - RNA, 19 nt, Artificial Sequence
  synthetic
cagaggccucuguuggcca

SEQ ID NO: 6728 - RNA, 19 nt, Artificial Sequence
  synthetic
ccagaggccucuguuggcc

SEQ ID NO: 6729 - RNA, 19 nt, Artificial Sequence
  synthetic
cccagaggccucuguuggc

SEQ ID NO: 6730 - RNA, 19 nt, Artificial Sequence
  synthetic
ucccagaggccucuguugg

SEQ ID NO: 6731 - RNA, 19 nt, Artificial Sequence
  synthetic
aucccagaggccucuguug

SEQ ID NO: 6732 - RNA, 19 nt, Artificial Sequence
  synthetic
aaucccagaggccucuguu

SEQ ID NO: 6733 - RNA, 19 nt, Artificial Sequence
  synthetic
gaaucccagaggccucugu

SEQ ID NO: 6734 - RNA, 19 nt, Artificial Sequence
  synthetic
ggaaucccagaggccucug

SEQ ID NO: 6735 - RNA, 19 nt, Artificial Sequence
  synthetic
aggaaucccagaggccucu

SEQ ID NO: 6736 - RNA, 19 nt, Artificial Sequence
  synthetic
aaggaaucccagaggccuc

SEQ ID NO: 6737 - RNA, 19 nt, Artificial Sequence
  synthetic
aaaggaaucccagaggccu

SEQ ID NO: 6738 - RNA, 19 nt, Artificial Sequence
  synthetic
gaaaggaaucccagaggcc

SEQ ID NO: 6739 - RNA, 19 nt, Artificial Sequence
  synthetic
cgaaaggaaucccagaggc

SEQ ID NO: 6740 - RNA, 19 nt, Artificial Sequence
  synthetic
acgaaaggaaucccagagg

SEQ ID NO: 6741 - RNA, 19 nt, Artificial Sequence
  synthetic
gacgaaaggaaucccagag

SEQ ID NO: 6742 - RNA, 19 nt, Artificial Sequence
  synthetic
ugacgaaaggaaucccaga

SEQ ID NO: 6743 - RNA, 19 nt, Artificial Sequence
  synthetic
cugacgaaaggaaucccag

SEQ ID NO: 6744 - RNA, 19 nt, Artificial Sequence
  synthetic
acugacgaaaggaauccca

SEQ ID NO: 6745 - RNA, 19 nt, Artificial Sequence
  synthetic
gacugacgaaaggaauccc

SEQ ID NO: 6746 - RNA, 19 nt, Artificial Sequence
  synthetic
ggacugacgaaaggaaucc

SEQ ID NO: 6747 - RNA, 19 nt, Artificial Sequence
  synthetic
cggacugacgaaaggaauc

SEQ ID NO: 6748 - RNA, 19 nt, Artificial Sequence
  synthetic
ucggacugacgaaaggaau

SEQ ID NO: 6749 - RNA, 19 nt, Artificial Sequence
  synthetic
uucggacugacgaaaggaa

SEQ ID NO: 6750 - RNA, 19 nt, Artificial Sequence
  synthetic
uuucggacugacgaaagga

SEQ ID NO: 6751 - RNA, 19 nt, Artificial Sequence
  synthetic
cuuucggacugacgaaagg

SEQ ID NO: 6752 - RNA, 19 nt, Artificial Sequence
  synthetic
ucuuucggacugacgaaag

SEQ ID NO: 6753 - RNA, 19 nt, Artificial Sequence
  synthetic
cucuuucggacugacgaaa

SEQ ID NO: 6754 - RNA, 19 nt, Artificial Sequence
  synthetic
ccucuuucggacugacgaa

SEQ ID NO: 6755 - RNA, 19 nt, Artificial Sequence
  synthetic
gccucuuucggacugacga

SEQ ID NO: 6756 - RNA, 19 nt, Artificial Sequence
  synthetic
cgccucuuucggacugacg

SEQ ID NO: 6757 - RNA, 19 nt, Artificial Sequence
  synthetic
ucgccucuuucggacugac

SEQ ID NO: 6758 - RNA, 19 nt, Artificial Sequence
  synthetic
uucgccucuuucggacuga

SEQ ID NO: 6759 - RNA, 19 nt, Artificial Sequence
  synthetic
cuucgccucuuucggacug

SEQ ID NO: 6760 - RNA, 19 nt, Artificial Sequence
  synthetic
ucuucgccucuuucggacu

SEQ ID NO: 6761 - RNA, 19 nt, Artificial Sequence
  synthetic
uucuucgccucuuucggac

SEQ ID NO: 6762 - RNA, 19 nt, Artificial Sequence
  synthetic
uuucuucgccucuuucgga

SEQ ID NO: 6763 - RNA, 19 nt, Artificial Sequence
  synthetic
guuucuucgccucuuucgg

SEQ ID NO: 6764 - RNA, 19 nt, Artificial Sequence
  synthetic
uguuucuucgccucuuucg

SEQ ID NO: 6765 - RNA, 19 nt, Artificial Sequence
  synthetic
uuguuucuucgccucuuuc

SEQ ID NO: 6766 - RNA, 19 nt, Artificial Sequence
  synthetic
auuguuucuucgccucuuu

SEQ ID NO: 6767 - RNA, 19 nt, Artificial Sequence
  synthetic
aauuguuucuucgccucuu

SEQ ID NO: 6768 - RNA, 19 nt, Artificial Sequence
  synthetic
caauuguuucuucgccucu

SEQ ID NO: 6769 - RNA, 19 nt, Artificial Sequence
  synthetic
ucaauuguuucuucgccuc

SEQ ID NO: 6770 - RNA, 19 nt, Artificial Sequence
  synthetic
uucaauuguuucuucgccu

SEQ ID NO: 6771 - RNA, 19 nt, Artificial Sequence
  synthetic
cuucaauuguuucuucgcc

SEQ ID NO: 6772 - RNA, 19 nt, Artificial Sequence
  synthetic
ucuucaauuguuucuucgc

SEQ ID NO: 6773 - RNA, 19 nt, Artificial Sequence
  synthetic
uucuucaauuguuucuucg

SEQ ID NO: 6774 - RNA, 19 nt, Artificial Sequence
  synthetic
uuucuucaauuguuucuuc

SEQ ID NO: 6775 - RNA, 19 nt, Artificial Sequence
  synthetic
uuuucuucaauuguuucuu

SEQ ID NO: 6776 - RNA, 19 nt, Artificial Sequence
  synthetic
uuuuucuucaauuguuucu

SEQ ID NO: 6777 - RNA, 19 nt, Artificial Sequence
  synthetic
auuuuucuucaauuguuuc

SEQ ID NO: 6778 - RNA, 19 nt, Artificial Sequence
  synthetic
aauuuuucuucaauuguuu

SEQ ID NO: 6779 - RNA, 19 nt, Artificial Sequence
  synthetic
aaauuuuucuucaauuguu

SEQ ID NO: 6780 - RNA, 19 nt, Artificial Sequence
  synthetic
caaauuuuucuucaauugu

SEQ ID NO: 6781 - RNA, 19 nt, Artificial Sequence
  synthetic
ucaaauuuuucuucaauug

SEQ ID NO: 6782 - RNA, 19 nt, Artificial Sequence
  synthetic
uucaaauuuuucuucaauu

SEQ ID NO: 6783 - RNA, 19 nt, Artificial Sequence
  synthetic
uuucaaauuuuucuucaau

SEQ ID NO: 6784 - RNA, 19 nt, Artificial Sequence
  synthetic
auuucaaauuuuucuucaa

SEQ ID NO: 6785 - RNA, 19 nt, Artificial Sequence
  synthetic
gauuucaaauuuuucuuca

SEQ ID NO: 6786 - RNA, 19 nt, Artificial Sequence
  synthetic
agauuucaaauuuuucuuc

SEQ ID NO: 6787 - RNA, 19 nt, Artificial Sequence
  synthetic
gagauuucaaauuuuucuu

SEQ ID NO: 6788 - RNA, 19 nt, Artificial Sequence
  synthetic
ugagauuucaaauuuuucu

SEQ ID NO: 6789 - RNA, 19 nt, Artificial Sequence
  synthetic
cugagauuucaaauuuuuc

SEQ ID NO: 6790 - RNA, 19 nt, Artificial Sequence
  synthetic
ccugagauuucaaauuuuu

SEQ ID NO: 6791 - RNA, 19 nt, Artificial Sequence
  synthetic
uccugagauuucaaauuuu

SEQ ID NO: 6792 - RNA, 19 nt, Artificial Sequence
  synthetic
uuccugagauuucaaauuu

SEQ ID NO: 6793 - RNA, 19 nt, Artificial Sequence
  synthetic
guuccugagauuucaaauu

SEQ ID NO: 6794 - RNA, 19 nt, Artificial Sequence
  synthetic
aguuccugagauuucaaau

SEQ ID NO: 6795 - RNA, 19 nt, Artificial Sequence
  synthetic
uaguuccugagauuucaaa

SEQ ID NO: 6796 - RNA, 19 nt, Artificial Sequence
  synthetic
auaguuccugagauuucaa

SEQ ID NO: 6797 - RNA, 19 nt, Artificial Sequence
  synthetic
cauaguuccugagauuuca

SEQ ID NO: 6798 - RNA, 19 nt, Artificial Sequence
  synthetic
gcauaguuccugagauuuc

SEQ ID NO: 6799 - RNA, 19 nt, Artificial Sequence
  synthetic
cgcauaguuccugagauuu

SEQ ID NO: 6800 - RNA, 19 nt, Artificial Sequence
  synthetic
ggcaagccugcgcauaguu

SEQ ID NO: 6801 - RNA, 19 nt, Artificial Sequence
  synthetic
gacuuuggucggcaagccu

SEQ ID NO: 6802 - RNA, 19 nt, Artificial Sequence
  synthetic
agacuuuggucggcaagcc

SEQ ID NO: 6803 - RNA, 19 nt, Artificial Sequence
  synthetic
gagacuuuggucggcaagc

SEQ ID NO: 6804 - RNA, 19 nt, Artificial Sequence
  synthetic
ggagacuuuggucggcaag

SEQ ID NO: 6805 - RNA, 19 nt, Artificial Sequence
  synthetic
gggagacuuuggucggcaa

SEQ ID NO: 6806 - RNA, 19 nt, Artificial Sequence
  synthetic
cggcgggagacuuuggucg

SEQ ID NO: 6807 - RNA, 19 nt, Artificial Sequence
  synthetic
caaggcaggagaaguucgg

SEQ ID NO: 6808 - RNA, 19 nt, Artificial Sequence
  synthetic
ucaaggcaggagaaguucg

SEQ ID NO: 6809 - RNA, 19 nt, Artificial Sequence
  synthetic
cucaaggcaggagaaguuc

SEQ ID NO: 6810 - RNA, 19 nt, Artificial Sequence
  synthetic
ucucaaggcaggagaaguu

SEQ ID NO: 6811 - RNA, 19 nt, Artificial Sequence
  synthetic
uucucaaggcaggagaagu

SEQ ID NO: 6812 - RNA, 19 nt, Artificial Sequence
  synthetic
auucucaaggcaggagaag

SEQ ID NO: 6813 - RNA, 19 nt, Artificial Sequence
  synthetic
aauucucaaggcaggagaa

SEQ ID NO: 6814 - RNA, 19 nt, Artificial Sequence
  synthetic
aaauucucaaggcaggaga

SEQ ID NO: 6815 - RNA, 19 nt, Artificial Sequence
  synthetic
aaaauucucaaggcaggag

SEQ ID NO: 6816 - RNA, 19 nt, Artificial Sequence
  synthetic
uaaaauucucaaggcagga

SEQ ID NO: 6817 - RNA, 19 nt, Artificial Sequence
  synthetic
cuaaaauucucaaggcagg

SEQ ID NO: 6818 - RNA, 19 nt, Artificial Sequence
  synthetic
ucuaaaauucucaaggcag

SEQ ID NO: 6819 - RNA, 19 nt, Artificial Sequence
  synthetic
cucuaaaauucucaaggca

SEQ ID NO: 6820 - RNA, 19 nt, Artificial Sequence
  synthetic
gcucuaaaauucucaaggc

SEQ ID NO: 6821 - RNA, 19 nt, Artificial Sequence
  synthetic
ggcucuaaaauucucaagg

SEQ ID NO: 6822 - RNA, 19 nt, Artificial Sequence
  synthetic
aggcucuaaaauucucaag

SEQ ID NO: 6823 - RNA, 19 nt, Artificial Sequence
  synthetic
uaggcucuaaaauucucaa

SEQ ID NO: 6824 - RNA, 19 nt, Artificial Sequence
  synthetic
auaggcucuaaaauucuca

SEQ ID NO: 6825 - RNA, 19 nt, Artificial Sequence
  synthetic
cauaggcucuaaaauucuc

SEQ ID NO: 6826 - RNA, 19 nt, Artificial Sequence
  synthetic
acauaggcucuaaaauucu

SEQ ID NO: 6827 - RNA, 19 nt, Artificial Sequence
  synthetic
cacauaggcucuaaaauuc

SEQ ID NO: 6828 - RNA, 19 nt, Artificial Sequence
  synthetic
ccacauaggcucuaaaauu

SEQ ID NO: 6829 - RNA, 19 nt, Artificial Sequence
  synthetic
uccacauaggcucuaaaau

SEQ ID NO: 6830 - RNA, 19 nt, Artificial Sequence
  synthetic
auccacauaggcucuaaaa

SEQ ID NO: 6831 - RNA, 19 nt, Artificial Sequence
  synthetic
cauccacauaggcucuaaa

SEQ ID NO: 6832 - RNA, 19 nt, Artificial Sequence
  synthetic
ccauccacauaggcucuaa

SEQ ID NO: 6833 - RNA, 19 nt, Artificial Sequence
  synthetic
uccauccacauaggcucua

SEQ ID NO: 6834 - RNA, 19 nt, Artificial Sequence
  synthetic
auccauccacauaggcucu

SEQ ID NO: 6835 - RNA, 19 nt, Artificial Sequence
  synthetic
aauccauccacauaggcuc

SEQ ID NO: 6836 - RNA, 19 nt, Artificial Sequence
  synthetic
gaauccauccacauaggcu

SEQ ID NO: 6837 - RNA, 19 nt, Artificial Sequence
  synthetic
cgaauccauccacauaggc

SEQ ID NO: 6838 - RNA, 19 nt, Artificial Sequence
  synthetic
ucgaauccauccacauagg

SEQ ID NO: 6839 - RNA, 19 nt, Artificial Sequence
  synthetic
uucgaauccauccacauag

SEQ ID NO: 6840 - RNA, 19 nt, Artificial Sequence
  synthetic
guucgaauccauccacaua

SEQ ID NO: 6841 - RNA, 19 nt, Artificial Sequence
  synthetic
gguucgaauccauccacau

SEQ ID NO: 6842 - RNA, 19 nt, Artificial Sequence
  synthetic
cgguucgaauccauccaca

SEQ ID NO: 6843 - RNA, 19 nt, Artificial Sequence
  synthetic
ucgguucgaauccauccac

SEQ ID NO: 6844 - RNA, 19 nt, Artificial Sequence
  synthetic
uucgguucgaauccaucca

SEQ ID NO: 6845 - RNA, 19 nt, Artificial Sequence
  synthetic
guucgguucgaauccaucc

SEQ ID NO: 6846 - RNA, 19 nt, Artificial Sequence
  synthetic
cguucgguucgaauccauc

SEQ ID NO: 6847 - RNA, 19 nt, Artificial Sequence
  synthetic
ccguucgguucgaauccau

SEQ ID NO: 6848 - RNA, 19 nt, Artificial Sequence
  synthetic
gccguucgguucgaaucca

SEQ ID NO: 6849 - RNA, 19 nt, Artificial Sequence
  synthetic
agccguucgguucgaaucc

SEQ ID NO: 6850 - RNA, 19 nt, Artificial Sequence
  synthetic
cagccguucgguucgaauc

SEQ ID NO: 6851 - RNA, 19 nt, Artificial Sequence
  synthetic
gcagccguucgguucgaau

SEQ ID NO: 6852 - RNA, 19 nt, Artificial Sequence
  synthetic
ugcagccguucgguucgaa

SEQ ID NO: 6853 - RNA, 19 nt, Artificial Sequence
  synthetic
augcagccguucgguucga

SEQ ID NO: 6854 - RNA, 19 nt, Artificial Sequence
  synthetic
aaugcagccguucgguucg

SEQ ID NO: 6855 - RNA, 19 nt, Artificial Sequence
  synthetic
caaugcagccguucgguuc

SEQ ID NO: 6856 - RNA, 19 nt, Artificial Sequence
  synthetic
ucaaugcagccguucgguu

SEQ ID NO: 6857 - RNA, 19 nt, Artificial Sequence
  synthetic
cucaaugcagccguucggu

SEQ ID NO: 6858 - RNA, 19 nt, Artificial Sequence
  synthetic
ccucaaugcagccguucgg

SEQ ID NO: 6859 - RNA, 19 nt, Artificial Sequence
  synthetic
cccucaaugcagccguucg

SEQ ID NO: 6860 - RNA, 19 nt, Artificial Sequence
  synthetic
gcccucaaugcagccguuc

SEQ ID NO: 6861 - RNA, 19 nt, Artificial Sequence
  synthetic
ugcccucaaugcagccguu

SEQ ID NO: 6862 - RNA, 19 nt, Artificial Sequence
  synthetic
uugcccucaaugcagccgu

SEQ ID NO: 6863 - RNA, 19 nt, Artificial Sequence
  synthetic
cuugcccucaaugcagccg

SEQ ID NO: 6864 - RNA, 19 nt, Artificial Sequence
  synthetic
gcuugcccucaaugcagcc

SEQ ID NO: 6865 - RNA, 19 nt, Artificial Sequence
  synthetic
agcuugcccucaaugcagc

SEQ ID NO: 6866 - RNA, 19 nt, Artificial Sequence
  synthetic
aagcuugcccucaaugcag

SEQ ID NO: 6867 - RNA, 19 nt, Artificial Sequence
  synthetic
aaagcuugcccucaaugca

SEQ ID NO: 6868 - RNA, 19 nt, Artificial Sequence
  synthetic
gaaagcuugcccucaaugc

SEQ ID NO: 6869 - RNA, 19 nt, Artificial Sequence
  synthetic
agaaagcuugcccucaaug

SEQ ID NO: 6870 - RNA, 19 nt, Artificial Sequence
  synthetic
gagaaagcuugcccucaau

SEQ ID NO: 6871 - RNA, 19 nt, Artificial Sequence
  synthetic
ugagaaagcuugcccucaa

SEQ ID NO: 6872 - RNA, 19 nt, Artificial Sequence
  synthetic
uugagaaagcuugcccuca

SEQ ID NO: 6873 - RNA, 19 nt, Artificial Sequence
  synthetic
uuugagaaagcuugcccuc

SEQ ID NO: 6874 - RNA, 19 nt, Artificial Sequence
  synthetic
auuugagaaagcuugcccu

SEQ ID NO: 6875 - RNA, 19 nt, Artificial Sequence
  synthetic
cauuugagaaagcuugccc

SEQ ID NO: 6876 - RNA, 19 nt, Artificial Sequence
  synthetic
acauuugagaaagcuugcc

SEQ ID NO: 6877 - RNA, 19 nt, Artificial Sequence
  synthetic
gacauuugagaaagcuugc

SEQ ID NO: 6878 - RNA, 19 nt, Artificial Sequence
  synthetic
ggacauuugagaaagcuug

SEQ ID NO: 6879 - RNA, 19 nt, Artificial Sequence
  synthetic
uggacauuugagaaagcuu

SEQ ID NO: 6880 - RNA, 19 nt, Artificial Sequence
  synthetic
uuggacauuugagaaagcu

SEQ ID NO: 6881 - RNA, 19 nt, Artificial Sequence
  synthetic
uuuggacauuugagaaagc

SEQ ID NO: 6882 - RNA, 19 nt, Artificial Sequence
  synthetic
cuuuggacauuugagaaag

SEQ ID NO: 6883 - RNA, 19 nt, Artificial Sequence
  synthetic
ucuuuggacauuugagaaa

SEQ ID NO: 6884 - RNA, 19 nt, Artificial Sequence
  synthetic
uucuuuggacauuugagaa

SEQ ID NO: 6885 - RNA, 19 nt, Artificial Sequence
  synthetic
cuucuuuggacauuugaga

SEQ ID NO: 6886 - RNA, 19 nt, Artificial Sequence
  synthetic
acuucuuuggacauuugag

SEQ ID NO: 6887 - RNA, 19 nt, Artificial Sequence
  synthetic
cacuucuuuggacauuuga

SEQ ID NO: 6888 - RNA, 19 nt, Artificial Sequence
  synthetic
ucacuucuuuggacauuug

SEQ ID NO: 6889 - RNA, 19 nt, Artificial Sequence
  synthetic
uucacuucuuuggacauuu

SEQ ID NO: 6890 - RNA, 19 nt, Artificial Sequence
  synthetic
auucacuucuuuggacauu

SEQ ID NO: 6891 - RNA, 19 nt, Artificial Sequence
  synthetic
cauucacuucuuuggacau

SEQ ID NO: 6892 - RNA, 19 nt, Artificial Sequence
  synthetic
gcauucacuucuuuggaca

SEQ ID NO: 6893 - RNA, 19 nt, Artificial Sequence
  synthetic
ggcauucacuucuuuggac

SEQ ID NO: 6894 - RNA, 19 nt, Artificial Sequence
  synthetic
uggcauucacuucuuugga

SEQ ID NO: 6895 - RNA, 19 nt, Artificial Sequence
  synthetic
uuggcauucacuucuuugg

SEQ ID NO: 6896 - RNA, 19 nt, Artificial Sequence
  synthetic
uuuggcauucacuucuuug

SEQ ID NO: 6897 - RNA, 19 nt, Artificial Sequence
  synthetic
uuuuggcauucacuucuuu

SEQ ID NO: 6898 - RNA, 19 nt, Artificial Sequence
  synthetic
auuuuggcauucacuucuu

SEQ ID NO: 6899 - RNA, 19 nt, Artificial Sequence
  synthetic
aauuuuggcauucacuucu

SEQ ID NO: 6900 - RNA, 19 nt, Artificial Sequence
  synthetic
caauuuuggcauucacuuc

SEQ ID NO: 6901 - RNA, 19 nt, Artificial Sequence
  synthetic
ucaauuuuggcauucacuu

SEQ ID NO: 6902 - RNA, 19 nt, Artificial Sequence
  synthetic
uucaauuuuggcauucacu

SEQ ID NO: 6903 - RNA, 19 nt, Artificial Sequence
  synthetic
guucaauuuuggcauucac

SEQ ID NO: 6904 - RNA, 19 nt, Artificial Sequence
  synthetic
gguucaauuuuggcauuca

SEQ ID NO: 6905 - RNA, 19 nt, Artificial Sequence
  synthetic
agguucaauuuuggcauuc

SEQ ID NO: 6906 - RNA, 19 nt, Artificial Sequence
  synthetic
aagguucaauuuuggcauu

SEQ ID NO: 6907 - RNA, 19 nt, Artificial Sequence
  synthetic
aaagguucaauuuuggcau

SEQ ID NO: 6908 - RNA, 19 nt, Artificial Sequence
  synthetic
aaaagguucaauuuuggca

SEQ ID NO: 6909 - RNA, 19 nt, Artificial Sequence
  synthetic
gaaaagguucaauuuuggc

SEQ ID NO: 6910 - RNA, 19 nt, Artificial Sequence
  synthetic
agaaaagguucaauuuugg

SEQ ID NO: 6911 - RNA, 19 nt, Artificial Sequence
  synthetic
cagaaaagguucaauuuug

SEQ ID NO: 6912 - RNA, 19 nt, Artificial Sequence
  synthetic
ucagaaaagguucaauuuu

SEQ ID NO: 6913 - RNA, 19 nt, Artificial Sequence
  synthetic
ugucuucagaaaagguuca

SEQ ID NO: 6914 - RNA, 19 nt, Artificial Sequence
  synthetic
gauuggucuugguguuguc

SEQ ID NO: 6915 - RNA, 19 nt, Artificial Sequence
  synthetic
ugauuggucuugguguugu

SEQ ID NO: 6916 - RNA, 19 nt, Artificial Sequence
  synthetic
uugauuggucuugguguug

SEQ ID NO: 6917 - RNA, 19 nt, Artificial Sequence
  synthetic
uuugauuggucuugguguu

SEQ ID NO: 6918 - RNA, 19 nt, Artificial Sequence
  synthetic
guuugauuggucuuggugu

SEQ ID NO: 6919 - RNA, 19 nt, Artificial Sequence
  synthetic
aguuugauuggucuuggug

SEQ ID NO: 6920 - RNA, 19 nt, Artificial Sequence
  synthetic
aaguuugauuggucuuggu

SEQ ID NO: 6921 - RNA, 19 nt, Artificial Sequence
  synthetic
gaaguuugauuggucuugg

SEQ ID NO: 6922 - RNA, 19 nt, Artificial Sequence
  synthetic
ggaaguuugauuggucuug

SEQ ID NO: 6923 - RNA, 19 nt, Artificial Sequence
  synthetic
aggagguccauucggaagu

SEQ ID NO: 6924 - RNA, 19 nt, Artificial Sequence
  synthetic
uuuggaccgcugauaacaa

SEQ ID NO: 6925 - RNA, 19 nt, Artificial Sequence
  synthetic
auuuggaccgcugauaaca

SEQ ID NO: 6926 - RNA, 19 nt, Artificial Sequence
  synthetic
aauuuggaccgcugauaac

SEQ ID NO: 6927 - RNA, 19 nt, Artificial Sequence
  synthetic
gaauuuggaccgcugauaa

SEQ ID NO: 6928 - RNA, 19 nt, Artificial Sequence
  synthetic
ggaauuuggaccgcugaua

SEQ ID NO: 6929 - RNA, 19 nt, Artificial Sequence
  synthetic
aggaauuuggaccgcugau

SEQ ID NO: 6930 - RNA, 19 nt, Artificial Sequence
  synthetic
gaggaauuuggaccgcuga

SEQ ID NO: 6931 - RNA, 19 nt, Artificial Sequence
  synthetic
ggaggaauuuggaccgcug

SEQ ID NO: 6932 - RNA, 19 nt, Artificial Sequence
  synthetic
aggaggaauuuggaccgcu

SEQ ID NO: 6933 - RNA, 19 nt, Artificial Sequence
  synthetic
ucaggaggaauuuggaccg

SEQ ID NO: 6934 - RNA, 19 nt, Artificial Sequence
  synthetic
aucaggaggaauuuggacc

SEQ ID NO: 6935 - RNA, 19 nt, Artificial Sequence
  synthetic
caucaggaggaauuuggac

SEQ ID NO: 6936 - RNA, 19 nt, Artificial Sequence
  synthetic
ccaucaggaggaauuugga

SEQ ID NO: 6937 - RNA, 19 nt, Artificial Sequence
  synthetic
uccaucaggaggaauuugg

SEQ ID NO: 6938 - RNA, 19 nt, Artificial Sequence
  synthetic
auccaucaggaggaauuug

SEQ ID NO: 6939 - RNA, 19 nt, Artificial Sequence
  synthetic
cauccaucaggaggaauuu

SEQ ID NO: 6940 - RNA, 19 nt, Artificial Sequence
  synthetic
gcauccaucaggaggaauu

SEQ ID NO: 6941 - RNA, 19 nt, Artificial Sequence
  synthetic
agcauccaucaggaggaau

SEQ ID NO: 6942 - RNA, 19 nt, Artificial Sequence
  synthetic
aagcauccaucaggaggaa

SEQ ID NO: 6943 - RNA, 19 nt, Artificial Sequence
  synthetic
aaagcauccaucaggagga

SEQ ID NO: 6944 - RNA, 19 nt, Artificial Sequence
  synthetic
uucaaugcucaauuuuaaa

SEQ ID NO: 6945 - RNA, 19 nt, Artificial Sequence
  synthetic
ggucuucaaugcucaauuu

SEQ ID NO: 6946 - RNA, 19 nt, Artificial Sequence
  synthetic
gggucuucaaugcucaauu

SEQ ID NO: 6947 - RNA, 19 nt, Artificial Sequence
  synthetic
ugggucuucaaugcucaau

SEQ ID NO: 6948 - RNA, 19 nt, Artificial Sequence
  synthetic
uugggucuucaaugcucaa

SEQ ID NO: 6949 - RNA, 19 nt, Artificial Sequence
  synthetic
cuugggucuucaaugcuca

SEQ ID NO: 6950 - RNA, 19 nt, Artificial Sequence
  synthetic
acuugggucuucaaugcuc

SEQ ID NO: 6951 - RNA, 19 nt, Artificial Sequence
  synthetic
gacuugggucuucaaugcu

SEQ ID NO: 6952 - RNA, 19 nt, Artificial Sequence
  synthetic
ugacuugggucuucaaugc

SEQ ID NO: 6953 - RNA, 19 nt, Artificial Sequence
  synthetic
gugacuugggucuucaaug

SEQ ID NO: 6954 - RNA, 19 nt, Artificial Sequence
  synthetic
cgugacuugggucuucaau

SEQ ID NO: 6955 - RNA, 19 nt, Artificial Sequence
  synthetic
ucgugacuugggucuucaa

SEQ ID NO: 6956 - RNA, 19 nt, Artificial Sequence
  synthetic
uucgugacuugggucuuca

SEQ ID NO: 6957 - RNA, 19 nt, Artificial Sequence
  synthetic
cuucgugacuugggucuuc

SEQ ID NO: 6958 - RNA, 19 nt, Artificial Sequence
  synthetic
ccuucgugacuugggucuu

SEQ ID NO: 6959 - RNA, 19 nt, Artificial Sequence
  synthetic
uccuucgugacuugggucu

SEQ ID NO: 6960 - RNA, 19 nt, Artificial Sequence
  synthetic
cuccuucgugacuuggguc

SEQ ID NO: 6961 - RNA, 19 nt, Artificial Sequence
  synthetic
ucuccuucgugacuugggu

SEQ ID NO: 6962 - RNA, 19 nt, Artificial Sequence
  synthetic
uucuccuucgugacuuggg

SEQ ID NO: 6963 - RNA, 19 nt, Artificial Sequence
  synthetic
cuucuccuucgugacuugg

SEQ ID NO: 6964 - RNA, 19 nt, Artificial Sequence
  synthetic
ccuucuccuucgugacuug

SEQ ID NO: 6965 - RNA, 19 nt, Artificial Sequence
  synthetic
cccuucuccuucgugacuu

SEQ ID NO: 6966 - RNA, 19 nt, Artificial Sequence
  synthetic
ucccuucuccuucgugacu

SEQ ID NO: 6967 - RNA, 19 nt, Artificial Sequence
  synthetic
aucccuucuccuucgugac

SEQ ID NO: 6968 - RNA, 19 nt, Artificial Sequence
  synthetic
auauagugggaucccuucu

SEQ ID NO: 6969 - RNA, 19 nt, Artificial Sequence
  synthetic
cacuugaucgcaucauaua

SEQ ID NO: 6970 - RNA, 19 nt, Artificial Sequence
  synthetic
gcacuugaucgcaucauau

SEQ ID NO: 6971 - RNA, 19 nt, Artificial Sequence
  synthetic
ugcacuugaucgcaucaua

SEQ ID NO: 6972 - RNA, 19 nt, Artificial Sequence
  synthetic
augcacuugaucgcaucau

SEQ ID NO: 6973 - RNA, 19 nt, Artificial Sequence
  synthetic
uaugcacuugaucgcauca

SEQ ID NO: 6974 - RNA, 19 nt, Artificial Sequence
  synthetic
caaagaauguuuuuaugca

SEQ ID NO: 6975 - RNA, 19 nt, Artificial Sequence
  synthetic
ccaaagaauguuuuuaugc

SEQ ID NO: 6976 - RNA, 19 nt, Artificial Sequence
  synthetic
uccaaagaauguuuuuaug

SEQ ID NO: 6977 - RNA, 19 nt, Artificial Sequence
  synthetic
auccaaagaauguuuuuau

SEQ ID NO: 6978 - RNA, 19 nt, Artificial Sequence
  synthetic
cauccaaagaauguuuuua

SEQ ID NO: 6979 - RNA, 19 nt, Artificial Sequence
  synthetic
ccauccaaagaauguuuuu

SEQ ID NO: 6980 - RNA, 19 nt, Artificial Sequence
  synthetic
uccauccaaagaauguuuu

SEQ ID NO: 6981 - RNA, 19 nt, Artificial Sequence
  synthetic
uuccauccaaagaauguuu

SEQ ID NO: 6982 - RNA, 19 nt, Artificial Sequence
  synthetic
uuuccauccaaagaauguu

SEQ ID NO: 6983 - RNA, 19 nt, Artificial Sequence
  synthetic
cuuuccauccaaagaaugu

SEQ ID NO: 6984 - RNA, 19 nt, Artificial Sequence
  synthetic
ucuuuccauccaaagaaug

SEQ ID NO: 6985 - RNA, 19 nt, Artificial Sequence
  synthetic
uucuuuccauccaaagaau

SEQ ID NO: 6986 - RNA, 19 nt, Artificial Sequence
  synthetic
guucuuuccauccaaagaa

SEQ ID NO: 6987 - RNA, 19 nt, Artificial Sequence
  synthetic
gguucuuuccauccaaaga

SEQ ID NO: 6988 - RNA, 19 nt, Artificial Sequence
  synthetic
gacuauauaggguucuuuc

SEQ ID NO: 6989 - RNA, 19 nt, Artificial Sequence
  synthetic
cgugugguuugacuauaua

SEQ ID NO: 6990 - RNA, 19 nt, Artificial Sequence
  synthetic
ucgugugguuugacuauau

SEQ ID NO: 6991 - RNA, 19 nt, Artificial Sequence
  synthetic
uucgugugguuugacuaua

SEQ ID NO: 6992 - RNA, 19 nt, Artificial Sequence
  synthetic
uuucgugugguuugacuau

SEQ ID NO: 6993 - RNA, 19 nt, Artificial Sequence
  synthetic
uuuucgugugguuugacua

SEQ ID NO: 6994 - RNA, 19 nt, Artificial Sequence
  synthetic
cuuuucgugugguuugacu

SEQ ID NO: 6995 - RNA, 19 nt, Artificial Sequence
  synthetic
ccuuuucgugugguuugac

SEQ ID NO: 6996 - RNA, 19 nt, Artificial Sequence
  synthetic
cccuuuucgugugguuuga

SEQ ID NO: 6997 - RNA, 19 nt, Artificial Sequence
  synthetic
ucccuuuucgugugguuug

SEQ ID NO: 6998 - RNA, 19 nt, Artificial Sequence
  synthetic
uucccuuuucgugugguuu

SEQ ID NO: 6999 - RNA, 19 nt, Artificial Sequence
  synthetic
auucccuuuucgugugguu

SEQ ID NO: 7000 - RNA, 19 nt, Artificial Sequence
  synthetic
uauucccuuuucguguggu

SEQ ID NO: 7001 - RNA, 19 nt, Artificial Sequence
  synthetic
uuauucccuuuucgugugg

SEQ ID NO: 7002 - RNA, 19 nt, Artificial Sequence
  synthetic
uuuauucccuuuucgugug

SEQ ID NO: 7003 - RNA, 19 nt, Artificial Sequence
  synthetic
auuuauucccuuuucgugu

SEQ ID NO: 7004 - RNA, 19 nt, Artificial Sequence
  synthetic
cagguaauuugaauuuauu

SEQ ID NO: 7005 - RNA, 19 nt, Artificial Sequence
  synthetic
uacuugcuuccaugacagc

SEQ ID NO: 7006 - RNA, 19 nt, Artificial Sequence
  synthetic
auacuugcuuccaugacag

SEQ ID NO: 7007 - RNA, 19 nt, Artificial Sequence
  synthetic
aauacuugcuuccaugaca

SEQ ID NO: 7008 - RNA, 19 nt, Artificial Sequence
  synthetic
caauacuugcuuccaugac

SEQ ID NO: 7009 - RNA, 19 nt, Artificial Sequence
  synthetic
acaauacuugcuuccauga

SEQ ID NO: 7010 - RNA, 19 nt, Artificial Sequence
  synthetic
gacaauacuugcuuccaug

SEQ ID NO: 7011 - RNA, 19 nt, Artificial Sequence
  synthetic
ugacaauacuugcuuccau

SEQ ID NO: 7012 - RNA, 19 nt, Artificial Sequence
  synthetic
cugacaauacuugcuucca

SEQ ID NO: 7013 - RNA, 19 nt, Artificial Sequence
  synthetic
ucugacaauacuugcuucc

SEQ ID NO: 7014 - RNA, 19 nt, Artificial Sequence
  synthetic
uucugacaauacuugcuuc

SEQ ID NO: 7015 - RNA, 19 nt, Artificial Sequence
  synthetic
auucugacaauacuugcuu

SEQ ID NO: 7016 - RNA, 19 nt, Artificial Sequence
  synthetic
aauucugacaauacuugcu

SEQ ID NO: 7017 - RNA, 19 nt, Artificial Sequence
  synthetic
caauucugacaauacuugc

SEQ ID NO: 7018 - RNA, 19 nt, Artificial Sequence
  synthetic
guccugcaauucugacaau

SEQ ID NO: 7019 - RNA, 19 nt, Artificial Sequence
  synthetic
cuucuccucauuuucaaug

SEQ ID NO: 7020 - RNA, 19 nt, Artificial Sequence
  synthetic
guuuuuaguccuuggaauc

SEQ ID NO: 7021 - RNA, 19 nt, Artificial Sequence
  synthetic
ucauguuuuuaguccuugg

SEQ ID NO: 7022 - RNA, 19 nt, Artificial Sequence
  synthetic
uucauguuuuuaguccuug

SEQ ID NO: 7023 - RNA, 19 nt, Artificial Sequence
  synthetic
cuucauguuuuuaguccuu

SEQ ID NO: 7024 - RNA, 19 nt, Artificial Sequence
  synthetic
ucuucauguuuuuaguccu

SEQ ID NO: 7025 - RNA, 19 nt, Artificial Sequence
  synthetic
uucuucauguuuuuagucc

SEQ ID NO: 7026 - RNA, 19 nt, Artificial Sequence
  synthetic
uuucuucauguuuuuaguc

SEQ ID NO: 7027 - RNA, 19 nt, Artificial Sequence
  synthetic
uuuucuucauguuuuuagu

SEQ ID NO: 7028 - RNA, 19 nt, Artificial Sequence
  synthetic
guuuucuucauguuuuuag

SEQ ID NO: 7029 - RNA, 19 nt, Artificial Sequence
  synthetic
uugacucguuuucuucaug

SEQ ID NO: 7030 - RNA, 19 nt, Artificial Sequence
  synthetic
guugacucguuuucuucau

SEQ ID NO: 7031 - RNA, 19 nt, Artificial Sequence
  synthetic
aguugacucguuuucuuca

SEQ ID NO: 7032 - RNA, 19 nt, Artificial Sequence
  synthetic
uaguugacucguuuucuuc

SEQ ID NO: 7033 - RNA, 19 nt, Artificial Sequence
  synthetic
uuaguugacucguuuucuu

SEQ ID NO: 7034 - RNA, 19 nt, Artificial Sequence
  synthetic
uuuaguugacucguuuucu

SEQ ID NO: 7035 - RNA, 19 nt, Artificial Sequence
  synthetic
cuuuaguugacucguuuuc

SEQ ID NO: 7036 - RNA, 19 nt, Artificial Sequence
  synthetic
acuuuaguugacucguuuu

SEQ ID NO: 7037 - RNA, 19 nt, Artificial Sequence
  synthetic
cacuuuaguugacucguuu

SEQ ID NO: 7038 - RNA, 19 nt, Artificial Sequence
  synthetic
ccacuuuaguugacucguu

SEQ ID NO: 7039 - RNA, 19 nt, Artificial Sequence
  synthetic
cccacuuuaguugacucgu

SEQ ID NO: 7040 - RNA, 19 nt, Artificial Sequence
  synthetic
gcccacuuuaguugacucg

SEQ ID NO: 7041 - RNA, 19 nt, Artificial Sequence
  synthetic
agcccacuuuaguugacuc

SEQ ID NO: 7042 - RNA, 19 nt, Artificial Sequence
  synthetic
gagcccacuuuaguugacu

SEQ ID NO: 7043 - RNA, 19 nt, Artificial Sequence
  synthetic
agagcccacuuuaguugac

SEQ ID NO: 7044 - RNA, 19 nt, Artificial Sequence
  synthetic
aagagcccacuuuaguuga

SEQ ID NO: 7045 - RNA, 19 nt, Artificial Sequence
  synthetic
caagagcccacuuuaguug

SEQ ID NO: 7046 - RNA, 19 nt, Artificial Sequence
  synthetic
ccaagagcccacuuuaguu

SEQ ID NO: 7047 - RNA, 19 nt, Artificial Sequence
  synthetic
accaagagcccacuuuagu

SEQ ID NO: 7048 - RNA, 19 nt, Artificial Sequence
  synthetic
caccaagagcccacuuuag

SEQ ID NO: 7049 - RNA, 19 nt, Artificial Sequence
  synthetic
ucaccaagagcccacuuua

SEQ ID NO: 7050 - RNA, 19 nt, Artificial Sequence
  synthetic
uucaccaagagcccacuuu

SEQ ID NO: 7051 - RNA, 19 nt, Artificial Sequence
  synthetic
uuucaccaagagcccacuu

SEQ ID NO: 7052 - RNA, 19 nt, Artificial Sequence
  synthetic
uuuucaccaagagcccacu

SEQ ID NO: 7053 - RNA, 19 nt, Artificial Sequence
  synthetic
guuuucaccaagagcccac

SEQ ID NO: 7054 - RNA, 19 nt, Artificial Sequence
  synthetic
uguuuucaccaagagccca

SEQ ID NO: 7055 - RNA, 19 nt, Artificial Sequence
  synthetic
auguuuucaccaagagccc

SEQ ID NO: 7056 - RNA, 19 nt, Artificial Sequence
  synthetic
cauguuuucaccaagagcc

SEQ ID NO: 7057 - RNA, 19 nt, Artificial Sequence
  synthetic
ccauguuuucaccaagagc

SEQ ID NO: 7058 - RNA, 19 nt, Artificial Sequence
  synthetic
gccauguuuucaccaagag

SEQ ID NO: 7059 - RNA, 19 nt, Artificial Sequence
  synthetic
ugccauguuuucaccaaga

SEQ ID NO: 7060 - RNA, 19 nt, Artificial Sequence
  synthetic
gugccauguuuucaccaag

SEQ ID NO: 7061 - RNA, 19 nt, Artificial Sequence
  synthetic
ggugccauguuuucaccaa

SEQ ID NO: 7062 - RNA, 19 nt, Artificial Sequence
  synthetic
uggugccauguuuucacca

SEQ ID NO: 7063 - RNA, 19 nt, Artificial Sequence
  synthetic
cuggugccauguuuucacc

SEQ ID NO: 7064 - RNA, 19 nt, Artificial Sequence
  synthetic
ucuggugccauguuuucac

SEQ ID NO: 7065 - RNA, 19 nt, Artificial Sequence
  synthetic
cucuggugccauguuuuca

SEQ ID NO: 7066 - RNA, 19 nt, Artificial Sequence
  synthetic
ucucuggugccauguuuuc

SEQ ID NO: 7067 - RNA, 19 nt, Artificial Sequence
  synthetic
uucucuggugccauguuuu

SEQ ID NO: 7068 - RNA, 19 nt, Artificial Sequence
  synthetic
uuucucuggugccauguuu

SEQ ID NO: 7069 - RNA, 19 nt, Artificial Sequence
  synthetic
cuuucucuggugccauguu

SEQ ID NO: 7070 - RNA, 19 nt, Artificial Sequence
  synthetic
acuuucucuggugccaugu

SEQ ID NO: 7071 - RNA, 19 nt, Artificial Sequence
  synthetic
uacuuucucuggugccaug

SEQ ID NO: 7072 - RNA, 19 nt, Artificial Sequence
  synthetic
cuacuuucucuggugccau

SEQ ID NO: 7073 - RNA, 19 nt, Artificial Sequence
  synthetic
ucuacuuucucuggugcca

SEQ ID NO: 7074 - RNA, 19 nt, Artificial Sequence
  synthetic
gucuacuuucucuggugcc

SEQ ID NO: 7075 - RNA, 19 nt, Artificial Sequence
  synthetic
agucuacuuucucuggugc

SEQ ID NO: 7076 - RNA, 19 nt, Artificial Sequence
  synthetic
aagucuacuuucucuggug

SEQ ID NO: 7077 - RNA, 19 nt, Artificial Sequence
  synthetic
aaagucuacuuucucuggu

SEQ ID NO: 7078 - RNA, 19 nt, Artificial Sequence
  synthetic
caaagucuacuuucucugg

SEQ ID NO: 7079 - RNA, 19 nt, Artificial Sequence
  synthetic
ucaaagucuacuuucucug

SEQ ID NO: 7080 - RNA, 19 nt, Artificial Sequence
  synthetic
gucaaagucuacuuucucu

SEQ ID NO: 7081 - RNA, 19 nt, Artificial Sequence
  synthetic
ugucaaagucuacuuucuc

SEQ ID NO: 7082 - RNA, 19 nt, Artificial Sequence
  synthetic
uugucaaagucuacuuucu

SEQ ID NO: 7083 - RNA, 19 nt, Artificial Sequence
  synthetic
guugucaaagucuacuuuc

SEQ ID NO: 7084 - RNA, 19 nt, Artificial Sequence
  synthetic
aguugucaaagucuacuuu

SEQ ID NO: 7085 - RNA, 19 nt, Artificial Sequence
  synthetic
caguugucaaagucuacuu

SEQ ID NO: 7086 - RNA, 19 nt, Artificial Sequence
  synthetic
gcaguugucaaagucuacu

SEQ ID NO: 7087 - RNA, 19 nt, Artificial Sequence
  synthetic
ugcaguugucaaagucuac

SEQ ID NO: 7088 - RNA, 19 nt, Artificial Sequence
  synthetic
cugcaguugucaaagucua

SEQ ID NO: 7089 - RNA, 19 nt, Artificial Sequence
  synthetic
ucugcaguugucaaagucu

SEQ ID NO: 7090 - RNA, 19 nt, Artificial Sequence
  synthetic
cucugcaguugucaaaguc

SEQ ID NO: 7091 - RNA, 19 nt, Artificial Sequence
  synthetic
ucucugcaguugucaaagu

SEQ ID NO: 7092 - RNA, 19 nt, Artificial Sequence
  synthetic
gucucugcaguugucaaag

SEQ ID NO: 7093 - RNA, 19 nt, Artificial Sequence
  synthetic
ugucucugcaguugucaaa

SEQ ID NO: 7094 - RNA, 19 nt, Artificial Sequence
  synthetic
augucucugcaguugucaa

SEQ ID NO: 7095 - RNA, 19 nt, Artificial Sequence
  synthetic
uaugucucugcaguuguca

SEQ ID NO: 7096 - RNA, 19 nt, Artificial Sequence
  synthetic
uuaugucucugcaguuguc

SEQ ID NO: 7097 - RNA, 19 nt, Artificial Sequence
  synthetic
cuuaugucucugcaguugu

SEQ ID NO: 7098 - RNA, 19 nt, Artificial Sequence
  synthetic
gcuuaugucucugcaguug

SEQ ID NO: 7099 - RNA, 19 nt, Artificial Sequence
  synthetic
cgcuuaugucucugcaguu

SEQ ID NO: 7100 - RNA, 19 nt, Artificial Sequence
  synthetic
ucgcuuaugucucugcagu

SEQ ID NO: 7101 - RNA, 19 nt, Artificial Sequence
  synthetic
aucgcuuaugucucugcag

SEQ ID NO: 7102 - RNA, 19 nt, Artificial Sequence
  synthetic
aaucgcuuaugucucugca

SEQ ID NO: 7103 - RNA, 19 nt, Artificial Sequence
  synthetic
aaaucgcuuaugucucugc

SEQ ID NO: 7104 - RNA, 19 nt, Artificial Sequence
  synthetic
caaaucgcuuaugucucug

SEQ ID NO: 7105 - RNA, 19 nt, Artificial Sequence
  synthetic
ucaaaucgcuuaugucucu

SEQ ID NO: 7106 - RNA, 19 nt, Artificial Sequence
  synthetic
uucaaaucgcuuaugucuc

SEQ ID NO: 7107 - RNA, 19 nt, Artificial Sequence
  synthetic
cuucaaaucgcuuaugucu

SEQ ID NO: 7108 - RNA, 19 nt, Artificial Sequence
  synthetic
gcuucaaaucgcuuauguc

SEQ ID NO: 7109 - RNA, 19 nt, Artificial Sequence
  synthetic
ugcuucaaaucgcuuaugu

SEQ ID NO: 7110 - RNA, 19 nt, Artificial Sequence
  synthetic
uugcuucaaaucgcuuaug

SEQ ID NO: 7111 - RNA, 19 nt, Artificial Sequence
  synthetic
auugcuucaaaucgcuuau

SEQ ID NO: 7112 - RNA, 19 nt, Artificial Sequence
  synthetic
uauugcuucaaaucgcuua

SEQ ID NO: 7113 - RNA, 19 nt, Artificial Sequence
  synthetic
auauugcuucaaaucgcuu

SEQ ID NO: 7114 - RNA, 19 nt, Artificial Sequence
  synthetic
cauauugcuucaaaucgcu

SEQ ID NO: 7115 - RNA, 19 nt, Artificial Sequence
  synthetic
ucauauugcuucaaaucgc

SEQ ID NO: 7116 - RNA, 19 nt, Artificial Sequence
  synthetic
aucauauugcuucaaaucg

SEQ ID NO: 7117 - RNA, 19 nt, Artificial Sequence
  synthetic
uaucauauugcuucaaauc

SEQ ID NO: 7118 - RNA, 19 nt, Artificial Sequence
  synthetic
cuaucauauugcuucaaau

SEQ ID NO: 7119 - RNA, 19 nt, Artificial Sequence
  synthetic
acuaucauauugcuucaaa

SEQ ID NO: 7120 - RNA, 19 nt, Artificial Sequence
  synthetic
cacuaucauauugcuucaa

SEQ ID NO: 7121 - RNA, 19 nt, Artificial Sequence
  synthetic
ucacuaucauauugcuuca

SEQ ID NO: 7122 - RNA, 19 nt, Artificial Sequence
  synthetic
gucacuaucauauugcuuc

SEQ ID NO: 7123 - RNA, 19 nt, Artificial Sequence
  synthetic
cgucacuaucauauugcuu

SEQ ID NO: 7124 - RNA, 19 nt, Artificial Sequence
  synthetic
ucgucacuaucauauugcu

SEQ ID NO: 7125 - RNA, 19 nt, Artificial Sequence
  synthetic
uucgucacuaucauauugc

SEQ ID NO: 7126 - RNA, 19 nt, Artificial Sequence
  synthetic
guucgucacuaucauauug

SEQ ID NO: 7127 - RNA, 19 nt, Artificial Sequence
  synthetic
gguucgucacuaucauauu

SEQ ID NO: 7128 - RNA, 19 nt, Artificial Sequence
  synthetic
agguucgucacuaucauau

SEQ ID NO: 7129 - RNA, 19 nt, Artificial Sequence
  synthetic
cagguucgucacuaucaua

SEQ ID NO: 7130 - RNA, 19 nt, Artificial Sequence
  synthetic
ucagguucgucacuaucau

SEQ ID NO: 7131 - RNA, 19 nt, Artificial Sequence
  synthetic
uucagguucgucacuauca

SEQ ID NO: 7132 - RNA, 19 nt, Artificial Sequence
  synthetic
auucagguucgucacuauc

SEQ ID NO: 7133 - RNA, 19 nt, Artificial Sequence
  synthetic
aauucagguucgucacuau

SEQ ID NO: 7134 - RNA, 19 nt, Artificial Sequence
  synthetic
uaauucagguucgucacua

SEQ ID NO: 7135 - RNA, 19 nt, Artificial Sequence
  synthetic
uuaauucagguucgucacu

SEQ ID NO: 7136 - RNA, 19 nt, Artificial Sequence
  synthetic
cuuaauucagguucgucac

SEQ ID NO: 7137 - RNA, 19 nt, Artificial Sequence
  synthetic
ccuuaauucagguucguca

SEQ ID NO: 7138 - RNA, 19 nt, Artificial Sequence
  synthetic
accuuaauucagguucguc

SEQ ID NO: 7139 - RNA, 19 nt, Artificial Sequence
  synthetic
gaccuuaauucagguucgu

SEQ ID NO: 7140 - RNA, 19 nt, Artificial Sequence
  synthetic
ugaccuuaauucagguucg

SEQ ID NO: 7141 - RNA, 19 nt, Artificial Sequence
  synthetic
gugaccuuaauucagguuc

SEQ ID NO: 7142 - RNA, 19 nt, Artificial Sequence
  synthetic
agugaccuuaauucagguu

SEQ ID NO: 7143 - RNA, 19 nt, Artificial Sequence
  synthetic
aagugaccuuaauucaggu

SEQ ID NO: 7144 - RNA, 19 nt, Artificial Sequence
  synthetic
aaagugaccuuaauucagg

SEQ ID NO: 7145 - RNA, 19 nt, Artificial Sequence
  synthetic
gaaagugaccuuaauucag

SEQ ID NO: 7146 - RNA, 19 nt, Artificial Sequence
  synthetic
ugaaagugaccuuaauuca

SEQ ID NO: 7147 - RNA, 19 nt, Artificial Sequence
  synthetic
uugaaagugaccuuaauuc

SEQ ID NO: 7148 - RNA, 19 nt, Artificial Sequence
  synthetic
cuugaaagugaccuuaauu

SEQ ID NO: 7149 - RNA, 19 nt, Artificial Sequence
  synthetic
gcuugaaagugaccuuaau

SEQ ID NO: 7150 - RNA, 19 nt, Artificial Sequence
  synthetic
agcuugaaagugaccuuaa

SEQ ID NO: 7151 - RNA, 19 nt, Artificial Sequence
  synthetic
cagcuugaaagugaccuua

SEQ ID NO: 7152 - RNA, 19 nt, Artificial Sequence
  synthetic
ccagcuugaaagugaccuu

SEQ ID NO: 7153 - RNA, 19 nt, Artificial Sequence
  synthetic
uccagcuugaaagugaccu

SEQ ID NO: 7154 - RNA, 19 nt, Artificial Sequence
  synthetic
auccagcuugaaagugacc

SEQ ID NO: 7155 - RNA, 19 nt, Artificial Sequence
  synthetic
uauccagcuugaaagugac

SEQ ID NO: 7156 - RNA, 19 nt, Artificial Sequence
  synthetic
guauccagcuugaaaguga

SEQ ID NO: 7157 - RNA, 19 nt, Artificial Sequence
  synthetic
uguauccagcuugaaagug

SEQ ID NO: 7158 - RNA, 19 nt, Artificial Sequence
  synthetic
cuguauccagcuugaaagu

SEQ ID NO: 7159 - RNA, 19 nt, Artificial Sequence
  synthetic
ucuguauccagcuugaaag

SEQ ID NO: 7160 - RNA, 19 nt, Artificial Sequence
  synthetic
uucuguauccagcuugaaa

SEQ ID NO: 7161 - RNA, 19 nt, Artificial Sequence
  synthetic
auucuguauccagcuugaa

SEQ ID NO: 7162 - RNA, 19 nt, Artificial Sequence
  synthetic
cauucuguauccagcuuga

SEQ ID NO: 7163 - RNA, 19 nt, Artificial Sequence
  synthetic
ucauucuguauccagcuug

SEQ ID NO: 7164 - RNA, 19 nt, Artificial Sequence
  synthetic
cucauucuguauccagcuu

SEQ ID NO: 7165 - RNA, 19 nt, Artificial Sequence
  synthetic
acucauucuguauccagcu

SEQ ID NO: 7166 - RNA, 19 nt, Artificial Sequence
  synthetic
aacucauucuguauccagc

SEQ ID NO: 7167 - RNA, 19 nt, Artificial Sequence
  synthetic
gaacucauucuguauccag

SEQ ID NO: 7168 - RNA, 19 nt, Artificial Sequence
  synthetic
ugaacucauucuguaucca

SEQ ID NO: 7169 - RNA, 19 nt, Artificial Sequence
  synthetic
uugaacucauucuguaucc

SEQ ID NO: 7170 - RNA, 19 nt, Artificial Sequence
  synthetic
guugaacucauucuguauc

SEQ ID NO: 7171 - RNA, 19 nt, Artificial Sequence
  synthetic
uguugaacucauucuguau

SEQ ID NO: 7172 - RNA, 19 nt, Artificial Sequence
  synthetic
uuguugaacucauucugua

SEQ ID NO: 7173 - RNA, 19 nt, Artificial Sequence
  synthetic
cuuguugaacucauucugu

SEQ ID NO: 7174 - RNA, 19 nt, Artificial Sequence
  synthetic
ccuuguugaacucauucug

SEQ ID NO: 7175 - RNA, 19 nt, Artificial Sequence
  synthetic
gccuuguugaacucauucu

SEQ ID NO: 7176 - RNA, 19 nt, Artificial Sequence
  synthetic
ggccuuguugaacucauuc

SEQ ID NO: 7177 - RNA, 19 nt, Artificial Sequence
  synthetic
aggccuuguugaacucauu

SEQ ID NO: 7178 - RNA, 19 nt, Artificial Sequence
  synthetic
caggccuuguugaacucau

SEQ ID NO: 7179 - RNA, 19 nt, Artificial Sequence
  synthetic
gcaggccuuguugaacuca

SEQ ID NO: 7180 - RNA, 19 nt, Artificial Sequence
  synthetic
cgcaggccuuguugaacuc

SEQ ID NO: 7181 - RNA, 19 nt, Artificial Sequence
  synthetic
ucgcaggccuuguugaacu

SEQ ID NO: 7182 - RNA, 19 nt, Artificial Sequence
  synthetic
cucgcaggccuuguugaac

SEQ ID NO: 7183 - RNA, 19 nt, Artificial Sequence
  synthetic
gcucgcaggccuuguugaa

SEQ ID NO: 7184 - RNA, 19 nt, Artificial Sequence
  synthetic
agcucgcaggccuuguuga

SEQ ID NO: 7185 - RNA, 19 nt, Artificial Sequence
  synthetic
uagcucgcaggccuuguug

SEQ ID NO: 7186 - RNA, 19 nt, Artificial Sequence
  synthetic
uuagcucgcaggccuuguu

SEQ ID NO: 7187 - RNA, 19 nt, Artificial Sequence
  synthetic
guuagcucgcaggccuugu

SEQ ID NO: 7188 - RNA, 19 nt, Artificial Sequence
  synthetic
aguuagcucgcaggccuug

SEQ ID NO: 7189 - RNA, 19 nt, Artificial Sequence
  synthetic
caguuagcucgcaggccuu

SEQ ID NO: 7190 - RNA, 19 nt, Artificial Sequence
  synthetic
ucaguuagcucgcaggccu

SEQ ID NO: 7191 - RNA, 19 nt, Artificial Sequence
  synthetic
aucaguuagcucgcaggcc

SEQ ID NO: 7192 - RNA, 19 nt, Artificial Sequence
  synthetic
aaucaguuagcucgcaggc

SEQ ID NO: 7193 - RNA, 19 nt, Artificial Sequence
  synthetic
gaaucaguuagcucgcagg

SEQ ID NO: 7194 - RNA, 19 nt, Artificial Sequence
  synthetic
ugaaucaguuagcucgcag

SEQ ID NO: 7195 - RNA, 19 nt, Artificial Sequence
  synthetic
gagcucuauccagauugaa

SEQ ID NO: 7196 - RNA, 19 nt, Artificial Sequence
  synthetic
ucaucgagcucuauccaga

SEQ ID NO: 7197 - RNA, 19 nt, Artificial Sequence
  synthetic
uucaucgagcucuauccag

SEQ ID NO: 7198 - RNA, 19 nt, Artificial Sequence
  synthetic
uuucaucgagcucuaucca

SEQ ID NO: 7199 - RNA, 19 nt, Artificial Sequence
  synthetic
auuucaucgagcucuaucc

SEQ ID NO: 7200 - RNA, 19 nt, Artificial Sequence
  synthetic
aauuucaucgagcucuauc

SEQ ID NO: 7201 - RNA, 19 nt, Artificial Sequence
  synthetic
caauuucaucgagcucuau

SEQ ID NO: 7202 - RNA, 19 nt, Artificial Sequence
  synthetic
ccaauuucaucgagcucua

SEQ ID NO: 7203 - RNA, 19 nt, Artificial Sequence
  synthetic
uccaauuucaucgagcucu

SEQ ID NO: 7204 - RNA, 19 nt, Artificial Sequence
  synthetic
cuccaauuucaucgagcuc

SEQ ID NO: 7205 - RNA, 19 nt, Artificial Sequence
  synthetic
ucuccaauuucaucgagcu

SEQ ID NO: 7206 - RNA, 19 nt, Artificial Sequence
  synthetic
cucuccaauuucaucgagc

SEQ ID NO: 7207 - RNA, 19 nt, Artificial Sequence
  synthetic
ccucuccaauuucaucgag

SEQ ID NO: 7208 - RNA, 19 nt, Artificial Sequence
  synthetic
uccucuccaauuucaucga

SEQ ID NO: 7209 - RNA, 19 nt, Artificial Sequence
  synthetic
guccucuccaauuucaucg

SEQ ID NO: 7210 - RNA, 19 nt, Artificial Sequence
  synthetic
cguccucuccaauuucauc

SEQ ID NO: 7211 - RNA, 19 nt, Artificial Sequence
  synthetic
acguccucuccaauuucau

SEQ ID NO: 7212 - RNA, 19 nt, Artificial Sequence
  synthetic
guacucaauuggggcuacg

SEQ ID NO: 7213 - RNA, 19 nt, Artificial Sequence
  synthetic
auguacucaauuggggcua

SEQ ID NO: 7214 - RNA, 19 nt, Artificial Sequence
  synthetic
aauguacucaauuggggcu

SEQ ID NO: 7215 - RNA, 19 nt, Artificial Sequence
  synthetic
caauguacucaauuggggc

SEQ ID NO: 7216 - RNA, 19 nt, Artificial Sequence
  synthetic
gcaauguacucaauugggg

SEQ ID NO: 7217 - RNA, 19 nt, Artificial Sequence
  synthetic
ugcaauguacucaauuggg

SEQ ID NO: 7218 - RNA, 19 nt, Artificial Sequence
  synthetic
uugcaauguacucaauugg

SEQ ID NO: 7219 - RNA, 19 nt, Artificial Sequence
  synthetic
cuugcaauguacucaauug

SEQ ID NO: 7220 - RNA, 19 nt, Artificial Sequence
  synthetic
gcuugcaauguacucaauu

SEQ ID NO: 7221 - RNA, 19 nt, Artificial Sequence
  synthetic
ugcuugcaauguacucaau

SEQ ID NO: 7222 - RNA, 19 nt, Artificial Sequence
  synthetic
augcuugcaauguacucaa

SEQ ID NO: 7223 - RNA, 19 nt, Artificial Sequence
  synthetic
caugcuugcaauguacuca

SEQ ID NO: 7224 - RNA, 19 nt, Artificial Sequence
  synthetic
ucaugcuugcaauguacuc

SEQ ID NO: 7225 - RNA, 19 nt, Artificial Sequence
  synthetic
cucaugcuugcaauguacu

SEQ ID NO: 7226 - RNA, 19 nt, Artificial Sequence
  synthetic
ccucaugcuugcaauguac

SEQ ID NO: 7227 - RNA, 19 nt, Artificial Sequence
  synthetic
uccucaugcuugcaaugua

SEQ ID NO: 7228 - RNA, 19 nt, Artificial Sequence
  synthetic
cuccucaugcuugcaaugu

SEQ ID NO: 7229 - RNA, 19 nt, Artificial Sequence
  synthetic
ccuccucaugcuugcaaug

SEQ ID NO: 7230 - RNA, 19 nt, Artificial Sequence
  synthetic
uccuccucaugcuugcaau

SEQ ID NO: 7231 - RNA, 19 nt, Artificial Sequence
  synthetic
uuccuccucaugcuugcaa

SEQ ID NO: 7232 - RNA, 19 nt, Artificial Sequence
  synthetic
auuccuccucaugcuugca

SEQ ID NO: 7233 - RNA, 19 nt, Artificial Sequence
  synthetic
aauuccuccucaugcuugc

SEQ ID NO: 7234 - RNA, 19 nt, Artificial Sequence
  synthetic
uaauuccuccucaugcuug

SEQ ID NO: 7235 - RNA, 19 nt, Artificial Sequence
  synthetic
auaauuccuccucaugcuu

SEQ ID NO: 7236 - RNA, 19 nt, Artificial Sequence
  synthetic
aauaauuccuccucaugcu

SEQ ID NO: 7237 - RNA, 19 nt, Artificial Sequence
  synthetic
aaauaauuccuccucaugc

SEQ ID NO: 7238 - RNA, 19 nt, Artificial Sequence
  synthetic
gaaauaauuccuccucaug

SEQ ID NO: 7239 - RNA, 19 nt, Artificial Sequence
  synthetic
ugaaauaauuccuccucau

SEQ ID NO: 7240 - RNA, 19 nt, Artificial Sequence
  synthetic
gugaaauaauuccuccuca

SEQ ID NO: 7241 - RNA, 19 nt, Artificial Sequence
  synthetic
ugugaaauaauuccuccuc

SEQ ID NO: 7242 - RNA, 19 nt, Artificial Sequence
  synthetic
cugugaaauaauuccuccu

SEQ ID NO: 7243 - RNA, 19 nt, Artificial Sequence
  synthetic
gcugugaaauaauuccucc

SEQ ID NO: 7244 - RNA, 19 nt, Artificial Sequence
  synthetic
ugcugugaaauaauuccuc

SEQ ID NO: 7245 - RNA, 19 nt, Artificial Sequence
  synthetic
cugcugugaaauaauuccu

SEQ ID NO: 7246 - RNA, 19 nt, Artificial Sequence
  synthetic
ucugcugugaaauaauucc

SEQ ID NO: 7247 - RNA, 19 nt, Artificial Sequence
  synthetic
cucugcugugaaauaauuc

SEQ ID NO: 7248 - RNA, 19 nt, Artificial Sequence
  synthetic
ccucugcugugaaauaauu

SEQ ID NO: 7249 - RNA, 19 nt, Artificial Sequence
  synthetic
accucugcugugaaauaau

SEQ ID NO: 7250 - RNA, 19 nt, Artificial Sequence
  synthetic
caccucugcugugaaauaa

SEQ ID NO: 7251 - RNA, 19 nt, Artificial Sequence
  synthetic
acaccucugcugugaaaua

SEQ ID NO: 7252 - RNA, 19 nt, Artificial Sequence
  synthetic
gacaccucugcugugaaau

SEQ ID NO: 7253 - RNA, 19 nt, Artificial Sequence
  synthetic
ggacaccucugcugugaaa

SEQ ID NO: 7254 - RNA, 19 nt, Artificial Sequence
  synthetic
gggacaccucugcugugaa

SEQ ID NO: 7255 - RNA, 19 nt, Artificial Sequence
  synthetic
ugggacaccucugcuguga

SEQ ID NO: 7256 - RNA, 19 nt, Artificial Sequence
  synthetic
augggacaccucugcugug

SEQ ID NO: 7257 - RNA, 19 nt, Artificial Sequence
  synthetic
aaugggacaccucugcugu

SEQ ID NO: 7258 - RNA, 19 nt, Artificial Sequence
  synthetic
caaugggacaccucugcug

SEQ ID NO: 7259 - RNA, 19 nt, Artificial Sequence
  synthetic
acaaugggacaccucugcu

SEQ ID NO: 7260 - RNA, 19 nt, Artificial Sequence
  synthetic
uacaaugggacaccucugc

SEQ ID NO: 7261 - RNA, 19 nt, Artificial Sequence
  synthetic
cuacaaugggacaccucug

SEQ ID NO: 7262 - RNA, 19 nt, Artificial Sequence
  synthetic
ucuacaaugggacaccucu

SEQ ID NO: 7263 - RNA, 19 nt, Artificial Sequence
  synthetic
cucuacaaugggacaccuc

SEQ ID NO: 7264 - RNA, 19 nt, Artificial Sequence
  synthetic
gcucuacaaugggacaccu

SEQ ID NO: 7265 - RNA, 19 nt, Artificial Sequence
  synthetic
ggcucuacaaugggacacc

SEQ ID NO: 7266 - RNA, 19 nt, Artificial Sequence
  synthetic
uggcucuacaaugggacac

SEQ ID NO: 7267 - RNA, 19 nt, Artificial Sequence
  synthetic
guggcucuacaaugggaca

SEQ ID NO: 7268 - RNA, 19 nt, Artificial Sequence
  synthetic
aguggcucuacaaugggac

SEQ ID NO: 7269 - RNA, 19 nt, Artificial Sequence
  synthetic
caguggcucuacaauggga

SEQ ID NO: 7270 - RNA, 19 nt, Artificial Sequence
  synthetic
ucaguggcucuacaauggg

SEQ ID NO: 7271 - RNA, 19 nt, Artificial Sequence
  synthetic
uguacucaguggcucuaca

SEQ ID NO: 7272 - RNA, 19 nt, Artificial Sequence
  synthetic
auguacucaguggcucuac

SEQ ID NO: 7273 - RNA, 19 nt, Artificial Sequence
  synthetic
uauguacucaguggcucua

SEQ ID NO: 7274 - RNA, 19 nt, Artificial Sequence
  synthetic
uuauguacucaguggcucu

SEQ ID NO: 7275 - RNA, 19 nt, Artificial Sequence
  synthetic
auuauguacucaguggcuc

SEQ ID NO: 7276 - RNA, 19 nt, Artificial Sequence
  synthetic
cauuauguacucaguggcu

SEQ ID NO: 7277 - RNA, 19 nt, Artificial Sequence
  synthetic
ucauuauguacucaguggc

SEQ ID NO: 7278 - RNA, 19 nt, Artificial Sequence
  synthetic
uucauuauguacucagugg

SEQ ID NO: 7279 - RNA, 19 nt, Artificial Sequence
  synthetic
cuucauuauguacucagug

SEQ ID NO: 7280 - RNA, 19 nt, Artificial Sequence
  synthetic
ccuucauuauguacucagu

SEQ ID NO: 7281 - RNA, 19 nt, Artificial Sequence
  synthetic
cccuucauuauguacucag

SEQ ID NO: 7282 - RNA, 19 nt, Artificial Sequence
  synthetic
ccccuucauuauguacuca

SEQ ID NO: 7283 - RNA, 19 nt, Artificial Sequence
  synthetic
cccccuucauuauguacuc

SEQ ID NO: 7284 - RNA, 19 nt, Artificial Sequence
  synthetic
acccccuucauuauguacu

SEQ ID NO: 7285 - RNA, 19 nt, Artificial Sequence
  synthetic
uacccccuucauuauguac

SEQ ID NO: 7286 - RNA, 19 nt, Artificial Sequence
  synthetic
auacccccuucauuaugua

SEQ ID NO: 7287 - RNA, 19 nt, Artificial Sequence
  synthetic
uauacccccuucauuaugu

SEQ ID NO: 7288 - RNA, 19 nt, Artificial Sequence
  synthetic
guauacccccuucauuaug

SEQ ID NO: 7289 - RNA, 19 nt, Artificial Sequence
  synthetic
uguauacccccuucauuau

SEQ ID NO: 7290 - RNA, 19 nt, Artificial Sequence
  synthetic
auguauacccccuucauua

SEQ ID NO: 7291 - RNA, 19 nt, Artificial Sequence
  synthetic
aauguauacccccuucauu

SEQ ID NO: 7292 - RNA, 19 nt, Artificial Sequence
  synthetic
uaauguauacccccuucau

SEQ ID NO: 7293 - RNA, 19 nt, Artificial Sequence
  synthetic
uuaauguauacccccuuca

SEQ ID NO: 7294 - RNA, 19 nt, Artificial Sequence
  synthetic
auuaauguauacccccuuc

SEQ ID NO: 7295 - RNA, 19 nt, Artificial Sequence
  synthetic
uauuaauguauacccccuu

SEQ ID NO: 7296 - RNA, 19 nt, Artificial Sequence
  synthetic
guauuaauguauacccccu

SEQ ID NO: 7297 - RNA, 19 nt, Artificial Sequence
  synthetic
aguauuaauguauaccccc

SEQ ID NO: 7298 - RNA, 19 nt, Artificial Sequence
  synthetic
caguauuaauguauacccc

SEQ ID NO: 7299 - RNA, 19 nt, Artificial Sequence
  synthetic
gcaguauuaauguauaccc

SEQ ID NO: 7300 - RNA, 19 nt, Artificial Sequence
  synthetic
ggcaguauuaauguauacc

SEQ ID NO: 7301 - RNA, 19 nt, Artificial Sequence
  synthetic
ggaugcauugagcaaggca

SEQ ID NO: 7302 - RNA, 19 nt, Artificial Sequence
  synthetic
gcacaggaugcauugagca

SEQ ID NO: 7303 - RNA, 19 nt, Artificial Sequence
  synthetic
ugcacaggaugcauugagc

SEQ ID NO: 7304 - RNA, 19 nt, Artificial Sequence
  synthetic
cugcacaggaugcauugag

SEQ ID NO: 7305 - RNA, 19 nt, Artificial Sequence
  synthetic
gcugcacaggaugcauuga

SEQ ID NO: 7306 - RNA, 19 nt, Artificial Sequence
  synthetic
ugcugcacaggaugcauug

SEQ ID NO: 7307 - RNA, 19 nt, Artificial Sequence
  synthetic
uugcugcacaggaugcauu

SEQ ID NO: 7308 - RNA, 19 nt, Artificial Sequence
  synthetic
auugcugcacaggaugcau

SEQ ID NO: 7309 - RNA, 19 nt, Artificial Sequence
  synthetic
cauugcugcacaggaugca

SEQ ID NO: 7310 - RNA, 19 nt, Artificial Sequence
  synthetic
ccauugcugcacaggaugc

SEQ ID NO: 7311 - RNA, 19 nt, Artificial Sequence
  synthetic
uccauugcugcacaggaug

SEQ ID NO: 7312 - RNA, 19 nt, Artificial Sequence
  synthetic
guccauugcugcacaggau

SEQ ID NO: 7313 - RNA, 19 nt, Artificial Sequence
  synthetic
cguccauugcugcacagga

SEQ ID NO: 7314 - RNA, 19 nt, Artificial Sequence
  synthetic
ucguccauugcugcacagg

SEQ ID NO: 7315 - RNA, 19 nt, Artificial Sequence
  synthetic
aucguccauugcugcacag

SEQ ID NO: 7316 - RNA, 19 nt, Artificial Sequence
  synthetic
aaucguccauugcugcaca

SEQ ID NO: 7317 - RNA, 19 nt, Artificial Sequence
  synthetic
aaaucguccauugcugcac

SEQ ID NO: 7318 - RNA, 19 nt, Artificial Sequence
  synthetic
aaaaucguccauugcugca

SEQ ID NO: 7319 - RNA, 19 nt, Artificial Sequence
  synthetic
gaaaaucguccauugcugc

SEQ ID NO: 7320 - RNA, 19 nt, Artificial Sequence
  synthetic
ugaaaaucguccauugcug

SEQ ID NO: 7321 - RNA, 19 nt, Artificial Sequence
  synthetic
uugaaaaucguccauugcu

SEQ ID NO: 7322 - RNA, 19 nt, Artificial Sequence
  synthetic
caugggaauuaguugaaaa

SEQ ID NO: 7323 - RNA, 19 nt, Artificial Sequence
  synthetic
uucugcacuugcuuaucau

SEQ ID NO: 7324 - RNA, 19 nt, Artificial Sequence
  synthetic
guucugcacuugcuuauca

SEQ ID NO: 7325 - RNA, 19 nt, Artificial Sequence
  synthetic
aguucugcacuugcuuauc

SEQ ID NO: 7326 - RNA, 19 nt, Artificial Sequence
  synthetic
uaguucugcacuugcuuau

SEQ ID NO: 7327 - RNA, 19 nt, Artificial Sequence
  synthetic
uuaguucugcacuugcuua

SEQ ID NO: 7328 - RNA, 19 nt, Artificial Sequence
  synthetic
uuuaguucugcacuugcuu

SEQ ID NO: 7329 - RNA, 19 nt, Artificial Sequence
  synthetic
cuuuaguucugcacuugcu

SEQ ID NO: 7330 - RNA, 19 nt, Artificial Sequence
  synthetic
ucuuuaguucugcacuugc

SEQ ID NO: 7331 - RNA, 19 nt, Artificial Sequence
  synthetic
cucuuuaguucugcacuug

SEQ ID NO: 7332 - RNA, 19 nt, Artificial Sequence
  synthetic
ccucuuuaguucugcacuu

SEQ ID NO: 7333 - RNA, 19 nt, Artificial Sequence
  synthetic
cccucuuuaguucugcacu

SEQ ID NO: 7334 - RNA, 19 nt, Artificial Sequence
  synthetic
ucccucuuuaguucugcac

SEQ ID NO: 7335 - RNA, 19 nt, Artificial Sequence
  synthetic
uucccucuuuaguucugca

SEQ ID NO: 7336 - RNA, 19 nt, Artificial Sequence
  synthetic
cuucccucuuuaguucugc

SEQ ID NO: 7337 - RNA, 19 nt, Artificial Sequence
  synthetic
uuuucgccuucccucuuua

SEQ ID NO: 7338 - RNA, 19 nt, Artificial Sequence
  synthetic
cauauaaauugguuuuucg

SEQ ID NO: 7339 - RNA, 19 nt, Artificial Sequence
  synthetic
ccauauaaauugguuuuuc

SEQ ID NO: 7340 - RNA, 19 nt, Artificial Sequence
  synthetic
uccauauaaauugguuuuu

SEQ ID NO: 7341 - RNA, 19 nt, Artificial Sequence
  synthetic
auccauauaaauugguuuu

SEQ ID NO: 7342 - RNA, 19 nt, Artificial Sequence
  synthetic
aauccauauaaauugguuu

SEQ ID NO: 7343 - RNA, 19 nt, Artificial Sequence
  synthetic
gaauccauauaaauugguu

SEQ ID NO: 7344 - RNA, 19 nt, Artificial Sequence
  synthetic
ugaauccauauaaauuggu

SEQ ID NO: 7345 - RNA, 19 nt, Artificial Sequence
  synthetic
augaauccauauaaauugg

SEQ ID NO: 7346 - RNA, 19 nt, Artificial Sequence
  synthetic
gaugaauccauauaaauug

SEQ ID NO: 7347 - RNA, 19 nt, Artificial Sequence
  synthetic
ugaugaauccauauaaauu

SEQ ID NO: 7348 - RNA, 19 nt, Artificial Sequence
  synthetic
augaugaauccauauaaau

SEQ ID NO: 7349 - RNA, 19 nt, Artificial Sequence
  synthetic
uaugaugaauccauauaaa

SEQ ID NO: 7350 - RNA, 19 nt, Artificial Sequence
  synthetic
uuaugaugaauccauauaa

SEQ ID NO: 7351 - RNA, 19 nt, Artificial Sequence
  synthetic
uuuaugaugaauccauaua

SEQ ID NO: 7352 - RNA, 19 nt, Artificial Sequence
  synthetic
agaucuuccuuuuaugaug

SEQ ID NO: 7353 - RNA, 19 nt, Artificial Sequence
  synthetic
uccuuaaaugagaucuucc

SEQ ID NO: 7354 - RNA, 19 nt, Artificial Sequence
  synthetic
uuccuuaaaugagaucuuc

SEQ ID NO: 7355 - RNA, 19 nt, Artificial Sequence
  synthetic
auuccuuaaaugagaucuu

SEQ ID NO: 7356 - RNA, 19 nt, Artificial Sequence
  synthetic
cauuccuuaaaugagaucu

SEQ ID NO: 7357 - RNA, 19 nt, Artificial Sequence
  synthetic
ucauuccuuaaaugagauc

SEQ ID NO: 7358 - RNA, 19 nt, Artificial Sequence
  synthetic
gucauuccuuaaaugagau

SEQ ID NO: 7359 - RNA, 19 nt, Artificial Sequence
  synthetic
ugucauuccuuaaaugaga

SEQ ID NO: 7360 - RNA, 19 nt, Artificial Sequence
  synthetic
gugucauuccuuaaaugag

SEQ ID NO: 7361 - RNA, 19 nt, Artificial Sequence
  synthetic
ugugucauuccuuaaauga

SEQ ID NO: 7362 - RNA, 19 nt, Artificial Sequence
  synthetic
cugugucauuccuuaaaug

SEQ ID NO: 7363 - RNA, 19 nt, Artificial Sequence
  synthetic
ucugugucauuccuuaaau

SEQ ID NO: 7364 - RNA, 19 nt, Artificial Sequence
  synthetic
aucugugucauuccuuaaa

SEQ ID NO: 7365 - RNA, 19 nt, Artificial Sequence
  synthetic
caucugugucauuccuuaa

SEQ ID NO: 7366 - RNA, 19 nt, Artificial Sequence
  synthetic
acaucugugucauuccuua

SEQ ID NO: 7367 - RNA, 19 nt, Artificial Sequence
  synthetic
cacaucugugucauuccuu

SEQ ID NO: 7368 - RNA, 19 nt, Artificial Sequence
  synthetic
ccacaucugugucauuccu

SEQ ID NO: 7369 - RNA, 19 nt, Artificial Sequence
  synthetic
accacaucugugucauucc

SEQ ID NO: 7370 - RNA, 19 nt, Artificial Sequence
  synthetic
uaccacaucugugucauuc

SEQ ID NO: 7371 - RNA, 19 nt, Artificial Sequence
  synthetic
uuaccacaucugugucauu

SEQ ID NO: 7372 - RNA, 19 nt, Artificial Sequence
  synthetic
uuuaccacaucugugucau

SEQ ID NO: 7373 - RNA, 19 nt, Artificial Sequence
  synthetic
guuuaccacaucuguguca

SEQ ID NO: 7374 - RNA, 19 nt, Artificial Sequence
  synthetic
aguuuaccacaucuguguc

SEQ ID NO: 7375 - RNA, 19 nt, Artificial Sequence
  synthetic
aaguuuaccacaucugugu

SEQ ID NO: 7376 - RNA, 19 nt, Artificial Sequence
  synthetic
aaaguuuaccacaucugug

SEQ ID NO: 7377 - RNA, 19 nt, Artificial Sequence
  synthetic
caaaguuuaccacaucugu

SEQ ID NO: 7378 - RNA, 19 nt, Artificial Sequence
  synthetic
acaaaguuuaccacaucug

SEQ ID NO: 7379 - RNA, 19 nt, Artificial Sequence
  synthetic
cacaaaguuuaccacaucu

SEQ ID NO: 7380 - RNA, 19 nt, Artificial Sequence
  synthetic
ucacaaaguuuaccacauc

SEQ ID NO: 7381 - RNA, 19 nt, Artificial Sequence
  synthetic
cucacaaaguuuaccacau

SEQ ID NO: 7382 - RNA, 19 nt, Artificial Sequence
  synthetic
gcucacaaaguuuaccaca

SEQ ID NO: 7383 - RNA, 19 nt, Artificial Sequence
  synthetic
ugcucacaaaguuuaccac

SEQ ID NO: 7384 - RNA, 19 nt, Artificial Sequence
  synthetic
augcucacaaaguuuacca

SEQ ID NO: 7385 - RNA, 19 nt, Artificial Sequence
  synthetic
caugcucacaaaguuuacc

SEQ ID NO: 7386 - RNA, 19 nt, Artificial Sequence
  synthetic
ccaugcucacaaaguuuac

SEQ ID NO: 7387 - RNA, 19 nt, Artificial Sequence
  synthetic
uccaugcucacaaaguuua

SEQ ID NO: 7388 - RNA, 19 nt, Artificial Sequence
  synthetic
gagagaaaacuccaugcuc

SEQ ID NO: 7389 - RNA, 19 nt, Artificial Sequence
  synthetic
ucgggucagugagagaaaa

SEQ ID NO: 7390 - RNA, 19 nt, Artificial Sequence
  synthetic
cucgggucagugagagaaa

SEQ ID NO: 7391 - RNA, 19 nt, Artificial Sequence
  synthetic
ucucgggucagugagagaa

SEQ ID NO: 7392 - RNA, 19 nt, Artificial Sequence
  synthetic
gucucgggucagugagaga

SEQ ID NO: 7393 - RNA, 19 nt, Artificial Sequence
  synthetic
agucucgggucagugagag

SEQ ID NO: 7394 - RNA, 19 nt, Artificial Sequence
  synthetic
cucaagucucgggucagug

SEQ ID NO: 7395 - RNA, 19 nt, Artificial Sequence
  synthetic
ucucccauuuauguggcuc

SEQ ID NO: 7396 - RNA, 19 nt, Artificial Sequence
  synthetic
uucucccauuuauguggcu

SEQ ID NO: 7397 - RNA, 19 nt, Artificial Sequence
  synthetic
uuucucccauuuauguggc

SEQ ID NO: 7398 - RNA, 19 nt, Artificial Sequence
  synthetic
auuucucccauuuaugugg

SEQ ID NO: 7399 - RNA, 19 nt, Artificial Sequence
  synthetic
uauuucucccauuuaugug

SEQ ID NO: 7400 - RNA, 19 nt, Artificial Sequence
  synthetic
guauuucucccauuuaugu

SEQ ID NO: 7401 - RNA, 19 nt, Artificial Sequence
  synthetic
aguauuucucccauuuaug

SEQ ID NO: 7402 - RNA, 19 nt, Artificial Sequence
  synthetic
caguauuucucccauuuau

SEQ ID NO: 7403 - RNA, 19 nt, Artificial Sequence
  synthetic
acaguauuucucccauuua

SEQ ID NO: 7404 - RNA, 19 nt, Artificial Sequence
  synthetic
cacaguauuucucccauuu

SEQ ID NO: 7405 - RNA, 19 nt, Artificial Sequence
  synthetic
acacaguauuucucccauu

SEQ ID NO: 7406 - RNA, 19 nt, Artificial Sequence
  synthetic
gacacaguauuucucccau

SEQ ID NO: 7407 - RNA, 19 nt, Artificial Sequence
  synthetic
ggacacaguauuucuccca

SEQ ID NO: 7408 - RNA, 19 nt, Artificial Sequence
  synthetic
aggacacaguauuucuccc

SEQ ID NO: 7409 - RNA, 19 nt, Artificial Sequence
  synthetic
aaggacacaguauuucucc

SEQ ID NO: 7410 - RNA, 19 nt, Artificial Sequence
  synthetic
caaggacacaguauuucuc

SEQ ID NO: 7411 - RNA, 19 nt, Artificial Sequence
  synthetic
ucaaggacacaguauuucu

SEQ ID NO: 7412 - RNA, 19 nt, Artificial Sequence
  synthetic
uaucucaaggacacaguau

SEQ ID NO: 7413 - RNA, 19 nt, Artificial Sequence
  synthetic
ucuuaguaacauaucuccu

SEQ ID NO: 7414 - RNA, 19 nt, Artificial Sequence
  synthetic
ggccuauggcacuucuuag

SEQ ID NO: 7415 - RNA, 19 nt, Artificial Sequence
  synthetic
uggccuauggcacuucuua

SEQ ID NO: 7416 - RNA, 19 nt, Artificial Sequence
  synthetic
uuggccuauggcacuucuu

SEQ ID NO: 7417 - RNA, 19 nt, Artificial Sequence
  synthetic
uuuggccuauggcacuucu

SEQ ID NO: 7418 - RNA, 19 nt, Artificial Sequence
  synthetic
auuuggccuauggcacuuc

SEQ ID NO: 7419 - RNA, 19 nt, Artificial Sequence
  synthetic
aauuuggccuauggcacuu

SEQ ID NO: 7420 - RNA, 19 nt, Artificial Sequence
  synthetic
cuugaaauuuggccuaugg

SEQ ID NO: 7421 - RNA, 19 nt, Artificial Sequence
  synthetic
gccuugaaauuuggccuau

SEQ ID NO: 7422 - RNA, 19 nt, Artificial Sequence
  synthetic
ggccuugaaauuuggccua

SEQ ID NO: 7423 - RNA, 19 nt, Artificial Sequence
  synthetic
uaggccuugaaauuuggcc

SEQ ID NO: 7424 - RNA, 19 nt, Artificial Sequence
  synthetic
auaggccuugaaauuuggc

SEQ ID NO: 7425 - RNA, 19 nt, Artificial Sequence
  synthetic
cauaggccuugaaauuugg

SEQ ID NO: 7426 - RNA, 19 nt, Artificial Sequence
  synthetic
acauaggccuugaaauuug

SEQ ID NO: 7427 - RNA, 19 nt, Artificial Sequence
  synthetic
aacauaggccuugaaauuu

SEQ ID NO: 7428 - RNA, 19 nt, Artificial Sequence
  synthetic
agaacauaggccuugaaau

SEQ ID NO: 7429 - RNA, 19 nt, Artificial Sequence
  synthetic
aagaacauaggccuugaaa

SEQ ID NO: 7430 - RNA, 19 nt, Artificial Sequence
  synthetic
caagaacauaggccuugaa

SEQ ID NO: 7431 - RNA, 19 nt, Artificial Sequence
  synthetic
acaagaacauaggccuuga

SEQ ID NO: 7432 - RNA, 19 nt, Artificial Sequence
  synthetic
uacaagaacauaggccuug

SEQ ID NO: 7433 - RNA, 19 nt, Artificial Sequence
  synthetic
auacaagaacauaggccuu

SEQ ID NO: 7434 - RNA, 19 nt, Artificial Sequence
  synthetic
cauacaagaacauaggccu

SEQ ID NO: 7435 - RNA, 19 nt, Artificial Sequence
  synthetic
acauacaagaacauaggcc

SEQ ID NO: 7436 - RNA, 19 nt, Artificial Sequence
  synthetic
cacauacaagaacauaggc

SEQ ID NO: 7437 - RNA, 19 nt, Artificial Sequence
  synthetic
ucacauacaagaacauagg

SEQ ID NO: 7438 - RNA, 19 nt, Artificial Sequence
  synthetic
cucacauacaagaacauag

SEQ ID NO: 7439 - RNA, 19 nt, Artificial Sequence
  synthetic
ccucacauacaagaacaua

SEQ ID NO: 7440 - RNA, 19 nt, Artificial Sequence
  synthetic
uccucacauacaagaacau

SEQ ID NO: 7441 - RNA, 19 nt, Artificial Sequence
  synthetic
guccucacauacaagaaca

SEQ ID NO: 7442 - RNA, 19 nt, Artificial Sequence
  synthetic
uguccucacauacaagaac

SEQ ID NO: 7443 - RNA, 19 nt, Artificial Sequence
  synthetic
uuguccucacauacaagaa

SEQ ID NO: 7444 - RNA, 19 nt, Artificial Sequence
  synthetic
uuuguccucacauacaaga

SEQ ID NO: 7445 - RNA, 19 nt, Artificial Sequence
  synthetic
guuuguccucacauacaag

SEQ ID NO: 7446 - RNA, 19 nt, Artificial Sequence
  synthetic
cguuuguccucacauacaa

SEQ ID NO: 7447 - RNA, 19 nt, Artificial Sequence
  synthetic
ccguuuguccucacauaca

SEQ ID NO: 7448 - RNA, 19 nt, Artificial Sequence
  synthetic
uccguuuguccucacauac

SEQ ID NO: 7449 - RNA, 19 nt, Artificial Sequence
  synthetic
uuccguuuguccucacaua

SEQ ID NO: 7450 - RNA, 19 nt, Artificial Sequence
  synthetic
guuccguuuguccucacau

SEQ ID NO: 7451 - RNA, 19 nt, Artificial Sequence
  synthetic
uguuccguuuguccucaca

SEQ ID NO: 7452 - RNA, 19 nt, Artificial Sequence
  synthetic
auguuccguuuguccucac

SEQ ID NO: 7453 - RNA, 19 nt, Artificial Sequence
  synthetic
gauguuccguuuguccuca

SEQ ID NO: 7454 - RNA, 19 nt, Artificial Sequence
  synthetic
ugauguuccguuuguccuc

SEQ ID NO: 7455 - RNA, 19 nt, Artificial Sequence
  synthetic
uugauguuccguuuguccu

SEQ ID NO: 7456 - RNA, 19 nt, Artificial Sequence
  synthetic
uuugauguuccguuugucc

SEQ ID NO: 7457 - RNA, 19 nt, Artificial Sequence
  synthetic
cuuugauguuccguuuguc

SEQ ID NO: 7458 - RNA, 19 nt, Artificial Sequence
  synthetic
ccuuugauguuccguuugu

SEQ ID NO: 7459 - RNA, 19 nt, Artificial Sequence
  synthetic
accuuugauguuccguuug

SEQ ID NO: 7460 - RNA, 19 nt, Artificial Sequence
  synthetic
gaccuuugauguuccguuu

SEQ ID NO: 7461 - RNA, 19 nt, Artificial Sequence
  synthetic
ugaccuuugauguuccguu

SEQ ID NO: 7462 - RNA, 19 nt, Artificial Sequence
  synthetic
uugaccuuugauguuccgu

SEQ ID NO: 7463 - RNA, 19 nt, Artificial Sequence
  synthetic
uuugaccuuugauguuccg

SEQ ID NO: 7464 - RNA, 19 nt, Artificial Sequence
  synthetic
uuuugaccuuugauguucc

SEQ ID NO: 7465 - RNA, 19 nt, Artificial Sequence
  synthetic
auuuugaccuuugauguuc

SEQ ID NO: 7466 - RNA, 19 nt, Artificial Sequence
  synthetic
cauuuugaccuuugauguu

SEQ ID NO: 7467 - RNA, 19 nt, Artificial Sequence
  synthetic
ucauuuugaccuuugaugu

SEQ ID NO: 7468 - RNA, 19 nt, Artificial Sequence
  synthetic
uucauuuugaccuuugaug

SEQ ID NO: 7469 - RNA, 19 nt, Artificial Sequence
  synthetic
uuucauuuugaccuuugau

SEQ ID NO: 7470 - RNA, 19 nt, Artificial Sequence
  synthetic
auuucauuuugaccuuuga

SEQ ID NO: 7471 - RNA, 19 nt, Artificial Sequence
  synthetic
cauuucauuuugaccuuug

SEQ ID NO: 7472 - RNA, 19 nt, Artificial Sequence
  synthetic
ccauuucauuuugaccuuu

SEQ ID NO: 7473 - RNA, 19 nt, Artificial Sequence
  synthetic
cccauuucauuuugaccuu

SEQ ID NO: 7474 - RNA, 19 nt, Artificial Sequence
  synthetic
ccccauuucauuuugaccu

SEQ ID NO: 7475 - RNA, 19 nt, Artificial Sequence
  synthetic
uccccauuucauuuugacc

SEQ ID NO: 7476 - RNA, 19 nt, Artificial Sequence
  synthetic
uuccccauuucauuuugac

SEQ ID NO: 7477 - RNA, 19 nt, Artificial Sequence
  synthetic
auuccccauuucauuuuga

SEQ ID NO: 7478 - RNA, 19 nt, Artificial Sequence
  synthetic
cauuccccauuucauuuug

SEQ ID NO: 7479 - RNA, 19 nt, Artificial Sequence
  synthetic
ccauuccccauuucauuuu

SEQ ID NO: 7480 - RNA, 19 nt, Artificial Sequence
  synthetic
uccauuccccauuucauuu

SEQ ID NO: 7481 - RNA, 19 nt, Artificial Sequence
  synthetic
cuccauuccccauuucauu

SEQ ID NO: 7482 - RNA, 19 nt, Artificial Sequence
  synthetic
ucuccauuccccauuucau

SEQ ID NO: 7483 - RNA, 19 nt, Artificial Sequence
  synthetic
aucuccauuccccauuuca

SEQ ID NO: 7484 - RNA, 19 nt, Artificial Sequence
  synthetic
caucuccauuccccauuuc

SEQ ID NO: 7485 - RNA, 19 nt, Artificial Sequence
  synthetic
ucaucuccauuccccauuu

SEQ ID NO: 7486 - RNA, 19 nt, Artificial Sequence
  synthetic
cucaucuccauuccccauu

SEQ ID NO: 7487 - RNA, 19 nt, Artificial Sequence
  synthetic
ucucaucuccauuccccau

SEQ ID NO: 7488 - RNA, 19 nt, Artificial Sequence
  synthetic
gucucaucuccauucccca

SEQ ID NO: 7489 - RNA, 19 nt, Artificial Sequence
  synthetic
cgucucaucuccauucccc

SEQ ID NO: 7490 - RNA, 19 nt, Artificial Sequence
  synthetic
acgucucaucuccauuccc

SEQ ID NO: 7491 - RNA, 19 nt, Artificial Sequence
  synthetic
aacgucucaucuccauucc

SEQ ID NO: 7492 - RNA, 19 nt, Artificial Sequence
  synthetic
caacgucucaucuccauuc

SEQ ID NO: 7493 - RNA, 19 nt, Artificial Sequence
  synthetic
gcaacgucucaucuccauu

SEQ ID NO: 7494 - RNA, 19 nt, Artificial Sequence
  synthetic
ggcaacgucucaucuccau

SEQ ID NO: 7495 - RNA, 19 nt, Artificial Sequence
  synthetic
aggcaacgucucaucucca

SEQ ID NO: 7496 - RNA, 19 nt, Artificial Sequence
  synthetic
gaggcaacgucucaucucc

SEQ ID NO: 7497 - RNA, 19 nt, Artificial Sequence
  synthetic
ggaggcaacgucucaucuc

SEQ ID NO: 7498 - RNA, 19 nt, Artificial Sequence
  synthetic
aggaggcaacgucucaucu

SEQ ID NO: 7499 - RNA, 19 nt, Artificial Sequence
  synthetic
cugaaggaggcaacgucuc

SEQ ID NO: 7500 - RNA, 19 nt, Artificial Sequence
  synthetic
cucgaucugcuggagugac

SEQ ID NO: 7501 - RNA, 19 nt, Artificial Sequence
  synthetic
cggcuucaaucaugcucuc

SEQ ID NO: 7502 - RNA, 19 nt, Artificial Sequence
  synthetic
ucggcuucaaucaugcucu

SEQ ID NO: 7503 - RNA, 19 nt, Artificial Sequence
  synthetic
cucggcuucaaucaugcuc

SEQ ID NO: 7504 - RNA, 19 nt, Artificial Sequence
  synthetic
acucggcuucaaucaugcu

SEQ ID NO: 7505 - RNA, 19 nt, Artificial Sequence
  synthetic
gacucggcuucaaucaugc

SEQ ID NO: 7506 - RNA, 19 nt, Artificial Sequence
  synthetic
ggacucggcuucaaucaug

SEQ ID NO: 7507 - RNA, 19 nt, Artificial Sequence
  synthetic
aggacucggcuucaaucau

SEQ ID NO: 7508 - RNA, 19 nt, Artificial Sequence
  synthetic
gaggacucggcuucaauca

SEQ ID NO: 7509 - RNA, 19 nt, Artificial Sequence
  synthetic
cgaggacucggcuucaauc

SEQ ID NO: 7510 - RNA, 19 nt, Artificial Sequence
  synthetic
uuucucuuuaaccgaggac

SEQ ID NO: 7511 - RNA, 19 nt, Artificial Sequence
  synthetic
gucaugucuuucucuuuaa

SEQ ID NO: 7512 - RNA, 19 nt, Artificial Sequence
  synthetic
ggucaugucuuucucuuua

SEQ ID NO: 7513 - RNA, 19 nt, Artificial Sequence
  synthetic
uggucaugucuuucucuuu

SEQ ID NO: 7514 - RNA, 19 nt, Artificial Sequence
  synthetic
uuggucaugucuuucucuu

SEQ ID NO: 7515 - RNA, 19 nt, Artificial Sequence
  synthetic
uuuggucaugucuuucucu

SEQ ID NO: 7516 - RNA, 19 nt, Artificial Sequence
  synthetic
cuuuggucaugucuuucuc

SEQ ID NO: 7517 - RNA, 19 nt, Artificial Sequence
  synthetic
ucuuuggucaugucuuucu

SEQ ID NO: 7518 - RNA, 19 nt, Artificial Sequence
  synthetic
cucuuuggucaugucuuuc

SEQ ID NO: 7519 - RNA, 19 nt, Artificial Sequence
  synthetic
acucuuuggucaugucuuu

SEQ ID NO: 7520 - RNA, 19 nt, Artificial Sequence
  synthetic
aacucuuuggucaugucuu

SEQ ID NO: 7521 - RNA, 19 nt, Artificial Sequence
  synthetic
aaacucuuuggucaugucu

SEQ ID NO: 7522 - RNA, 19 nt, Artificial Sequence
  synthetic
aaaacucuuuggucauguc

SEQ ID NO: 7523 - RNA, 19 nt, Artificial Sequence
  synthetic
aaaaacucuuuggucaugu

SEQ ID NO: 7524 - RNA, 19 nt, Artificial Sequence
  synthetic
aaaaaacucuuuggucaug

SEQ ID NO: 7525 - RNA, 19 nt, Artificial Sequence
  synthetic
caaaaaacucuuuggucau

SEQ ID NO: 7526 - RNA, 19 nt, Artificial Sequence
  synthetic
ucaaaaaacucuuugguca

SEQ ID NO: 7527 - RNA, 19 nt, Artificial Sequence
  synthetic
cucaaaaaacucuuugguc

SEQ ID NO: 7528 - RNA, 19 nt, Artificial Sequence
  synthetic
ucucaaaaaacucuuuggu

SEQ ID NO: 7529 - RNA, 19 nt, Artificial Sequence
  synthetic
uucucaaaaaacucuuugg

SEQ ID NO: 7530 - RNA, 19 nt, Artificial Sequence
  synthetic
auucucaaaaaacucuuug

SEQ ID NO: 7531 - RNA, 19 nt, Artificial Sequence
  synthetic
uauucucaaaaaacucuuu

SEQ ID NO: 7532 - RNA, 19 nt, Artificial Sequence
  synthetic
uuauucucaaaaaacucuu

SEQ ID NO: 7533 - RNA, 19 nt, Artificial Sequence
  synthetic
uuuauucucaaaaaacucu

SEQ ID NO: 7534 - RNA, 19 nt, Artificial Sequence
  synthetic
auuuauucucaaaaaacuc

SEQ ID NO: 7535 - RNA, 19 nt, Artificial Sequence
  synthetic
gauuuauucucaaaaaacu

SEQ ID NO: 7536 - RNA, 19 nt, Artificial Sequence
  synthetic
ugauuuauucucaaaaaac

SEQ ID NO: 7537 - RNA, 19 nt, Artificial Sequence
  synthetic
cugauuuauucucaaaaaa

SEQ ID NO: 7538 - RNA, 19 nt, Artificial Sequence
  synthetic
ucugauuuauucucaaaaa

SEQ ID NO: 7539 - RNA, 19 nt, Artificial Sequence
  synthetic
uucugauuuauucucaaaa

SEQ ID NO: 7540 - RNA, 19 nt, Artificial Sequence
  synthetic
cuucugauuuauucucaaa

SEQ ID NO: 7541 - RNA, 19 nt, Artificial Sequence
  synthetic
gcuucugauuuauucucaa

SEQ ID NO: 7542 - RNA, 19 nt, Artificial Sequence
  synthetic
ugcuucugauuuauucuca

SEQ ID NO: 7543 - RNA, 19 nt, Artificial Sequence
  synthetic
augcuucugauuuauucuc

SEQ ID NO: 7544 - RNA, 19 nt, Artificial Sequence
  synthetic
caugcuucugauuuauucu

SEQ ID NO: 7545 - RNA, 19 nt, Artificial Sequence
  synthetic
ccaugcuucugauuuauuc

SEQ ID NO: 7546 - RNA, 19 nt, Artificial Sequence
  synthetic
gccaugcuucugauuuauu

SEQ ID NO: 7547 - RNA, 19 nt, Artificial Sequence
  synthetic
ggccaugcuucugauuuau

SEQ ID NO: 7548 - RNA, 19 nt, Artificial Sequence
  synthetic
gggccaugcuucugauuua

SEQ ID NO: 7549 - RNA, 19 nt, Artificial Sequence
  synthetic
ugggccaugcuucugauuu

SEQ ID NO: 7550 - RNA, 19 nt, Artificial Sequence
  synthetic
augggccaugcuucugauu

SEQ ID NO: 7551 - RNA, 19 nt, Artificial Sequence
  synthetic
aaugggccaugcuucugau

SEQ ID NO: 7552 - RNA, 19 nt, Artificial Sequence
  synthetic
caaugggccaugcuucuga

SEQ ID NO: 7553 - RNA, 19 nt, Artificial Sequence
  synthetic
ccaaugggccaugcuucug

SEQ ID NO: 7554 - RNA, 19 nt, Artificial Sequence
  synthetic
cccaaugggccaugcuucu

SEQ ID NO: 7555 - RNA, 19 nt, Artificial Sequence
  synthetic
ccccaaugggccaugcuuc

SEQ ID NO: 7556 - RNA, 19 nt, Artificial Sequence
  synthetic
uccccaaugggccaugcuu

SEQ ID NO: 7557 - RNA, 19 nt, Artificial Sequence
  synthetic
cuccccaaugggccaugcu

SEQ ID NO: 7558 - RNA, 19 nt, Artificial Sequence
  synthetic
acuccccaaugggccaugc

SEQ ID NO: 7559 - RNA, 19 nt, Artificial Sequence
  synthetic
gacuccccaaugggccaug

SEQ ID NO: 7560 - RNA, 19 nt, Artificial Sequence
  synthetic
uuccacucccuugggggac

SEQ ID NO: 7561 - RNA, 19 nt, Artificial Sequence
  synthetic
cuucuuccacucccuuggg

SEQ ID NO: 7562 - RNA, 19 nt, Artificial Sequence
  synthetic
ccuucuuccacucccuugg

SEQ ID NO: 7563 - RNA, 19 nt, Artificial Sequence
  synthetic
uuucccaauggagccuucu

SEQ ID NO: 7564 - RNA, 19 nt, Artificial Sequence
  synthetic
uacagacuuucccaaugga

SEQ ID NO: 7565 - RNA, 19 nt, Artificial Sequence
  synthetic
cuacagacuuucccaaugg

SEQ ID NO: 7566 - RNA, 19 nt, Artificial Sequence
  synthetic
ccuacagacuuucccaaug

SEQ ID NO: 7567 - RNA, 19 nt, Artificial Sequence
  synthetic
uccuacagacuuucccaau

SEQ ID NO: 7568 - RNA, 19 nt, Artificial Sequence
  synthetic
guccuacagacuuucccaa

SEQ ID NO: 7569 - RNA, 19 nt, Artificial Sequence
  synthetic
aguccuacagacuuuccca

SEQ ID NO: 7570 - RNA, 19 nt, Artificial Sequence
  synthetic
caacaaaguccuacagacu

SEQ ID NO: 7571 - RNA, 19 nt, Artificial Sequence
  synthetic
auugaacaccgacuuagcc

SEQ ID NO: 7572 - RNA, 19 nt, Artificial Sequence
  synthetic
cauacaggcuauugaacac

SEQ ID NO: 7573 - RNA, 19 nt, Artificial Sequence
  synthetic
gcauacaggcuauugaaca

SEQ ID NO: 7574 - RNA, 19 nt, Artificial Sequence
  synthetic
ugcauacaggcuauugaac

SEQ ID NO: 7575 - RNA, 19 nt, Artificial Sequence
  synthetic
augcauacaggcuauugaa

SEQ ID NO: 7576 - RNA, 19 nt, Artificial Sequence
  synthetic
gaugcauacaggcuauuga

SEQ ID NO: 7577 - RNA, 19 nt, Artificial Sequence
  synthetic
uggagaugcauacaggcua

SEQ ID NO: 7578 - RNA, 19 nt, Artificial Sequence
  synthetic
ugaaaauccuucuaauugu

SEQ ID NO: 7579 - RNA, 19 nt, Artificial Sequence
  synthetic
uucuugacuccgcugaaaa

SEQ ID NO: 7580 - RNA, 19 nt, Artificial Sequence
  synthetic
uuucuugacuccgcugaaa

SEQ ID NO: 7581 - RNA, 19 nt, Artificial Sequence
  synthetic
uuuucuugacuccgcugaa

SEQ ID NO: 7582 - RNA, 19 nt, Artificial Sequence
  synthetic
guuuucuugacuccgcuga

SEQ ID NO: 7583 - RNA, 19 nt, Artificial Sequence
  synthetic
aguuuucuugacuccgcug

SEQ ID NO: 7584 - RNA, 19 nt, Artificial Sequence
  synthetic
caguuuucuugacuccgcu

SEQ ID NO: 7585 - RNA, 19 nt, Artificial Sequence
  synthetic
gcaguuuucuugacuccgc

SEQ ID NO: 7586 - RNA, 19 nt, Artificial Sequence
  synthetic
agcaguuuucuugacuccg

SEQ ID NO: 7587 - RNA, 19 nt, Artificial Sequence
  synthetic
agccugaacaacaaggagc

SEQ ID NO: 7588 - RNA, 19 nt, Artificial Sequence
  synthetic
uaagagccugaacaacaag

SEQ ID NO: 7589 - RNA, 19 nt, Artificial Sequence
  synthetic
cuaagagccugaacaacaa

SEQ ID NO: 7590 - RNA, 19 nt, Artificial Sequence
  synthetic
ccuaagagccugaacaaca

SEQ ID NO: 7591 - RNA, 19 nt, Artificial Sequence
  synthetic
cccuaagagccugaacaac

SEQ ID NO: 7592 - RNA, 19 nt, Artificial Sequence
  synthetic
ucccuaagagccugaacaa

SEQ ID NO: 7593 - RNA, 19 nt, Artificial Sequence
  synthetic
gucccuaagagccugaaca

SEQ ID NO: 7594 - RNA, 19 nt, Artificial Sequence
  synthetic
ugucccuaagagccugaac

SEQ ID NO: 7595 - RNA, 19 nt, Artificial Sequence
  synthetic
uugucccuaagagccugaa

SEQ ID NO: 7596 - RNA, 19 nt, Artificial Sequence
  synthetic
guugucccuaagagccuga

SEQ ID NO: 7597 - RNA, 19 nt, Artificial Sequence
  synthetic
gguugucccuaagagccug

SEQ ID NO: 7598 - RNA, 19 nt, Artificial Sequence
  synthetic
agguugucccuaagagccu

SEQ ID NO: 7599 - RNA, 19 nt, Artificial Sequence
  synthetic
gagguugucccuaagagcc

SEQ ID NO: 7600 - RNA, 19 nt, Artificial Sequence
  synthetic
cgagguugucccuaagagc

SEQ ID NO: 7601 - RNA, 19 nt, Artificial Sequence
  synthetic
ucgagguugucccuaagag

SEQ ID NO: 7602 - RNA, 19 nt, Artificial Sequence
  synthetic
uucgagguugucccuaaga

SEQ ID NO: 7603 - RNA, 19 nt, Artificial Sequence
  synthetic
guucgagguugucccuaag

SEQ ID NO: 7604 - RNA, 19 nt, Artificial Sequence
  synthetic
gguucgagguugucccuaa

SEQ ID NO: 7605 - RNA, 19 nt, Artificial Sequence
  synthetic
agguucgagguugucccua

SEQ ID NO: 7606 - RNA, 19 nt, Artificial Sequence
  synthetic
cagguucgagguugucccu

SEQ ID NO: 7607 - RNA, 19 nt, Artificial Sequence
  synthetic
ccagguucgagguuguccc

SEQ ID NO: 7608 - RNA, 19 nt, Artificial Sequence
  synthetic
cccagguucgagguugucc

SEQ ID NO: 7609 - RNA, 19 nt, Artificial Sequence
  synthetic
ucccagguucgagguuguc

SEQ ID NO: 7610 - RNA, 19 nt, Artificial Sequence
  synthetic
gucccagguucgagguugu

SEQ ID NO: 7611 - RNA, 19 nt, Artificial Sequence
  synthetic
caaaggucccagguucgag

SEQ ID NO: 7612 - RNA, 19 nt, Artificial Sequence
  synthetic
ucaaaggucccagguucga

SEQ ID NO: 7613 - RNA, 19 nt, Artificial Sequence
  synthetic
aucaaaggucccagguucg

SEQ ID NO: 7614 - RNA, 19 nt, Artificial Sequence
  synthetic
gaucaaaggucccagguuc

SEQ ID NO: 7615 - RNA, 19 nt, Artificial Sequence
  synthetic
agaucaaaggucccagguu

SEQ ID NO: 7616 - RNA, 19 nt, Artificial Sequence
  synthetic
aagaucaaaggucccaggu

SEQ ID NO: 7617 - RNA, 19 nt, Artificial Sequence
  synthetic
ugcuucauauagcccccca

SEQ ID NO: 7618 - RNA, 19 nt, Artificial Sequence
  synthetic
uugcuucauauagcccccc

SEQ ID NO: 7619 - RNA, 19 nt, Artificial Sequence
  synthetic
auugcuucauauagccccc

SEQ ID NO: 7620 - RNA, 19 nt, Artificial Sequence
  synthetic
aauugcuucauauagcccc

SEQ ID NO: 7621 - RNA, 19 nt, Artificial Sequence
  synthetic
caauugcuucauauagccc

SEQ ID NO: 7622 - RNA, 19 nt, Artificial Sequence
  synthetic
ucaauugcuucauauagcc

SEQ ID NO: 7623 - RNA, 19 nt, Artificial Sequence
  synthetic
cucaauugcuucauauagc

SEQ ID NO: 7624 - RNA, 19 nt, Artificial Sequence
  synthetic
ccucaauugcuucauauag

SEQ ID NO: 7625 - RNA, 19 nt, Artificial Sequence
  synthetic
uccucaauugcuucauaua

SEQ ID NO: 7626 - RNA, 19 nt, Artificial Sequence
  synthetic
cuccucaauugcuucauau

SEQ ID NO: 7627 - RNA, 19 nt, Artificial Sequence
  synthetic
acuccucaauugcuucaua

SEQ ID NO: 7628 - RNA, 19 nt, Artificial Sequence
  synthetic
cacuccucaauugcuucau

SEQ ID NO: 7629 - RNA, 19 nt, Artificial Sequence
  synthetic
gcacuccucaauugcuuca

SEQ ID NO: 7630 - RNA, 19 nt, Artificial Sequence
  synthetic
ggcacuccucaauugcuuc

SEQ ID NO: 7631 - RNA, 19 nt, Artificial Sequence
  synthetic
aggcacuccucaauugcuu

SEQ ID NO: 7632 - RNA, 19 nt, Artificial Sequence
  synthetic
caggcacuccucaauugcu

SEQ ID NO: 7633 - RNA, 19 nt, Artificial Sequence
  synthetic
ucaggcacuccucaauugc

SEQ ID NO: 7634 - RNA, 19 nt, Artificial Sequence
  synthetic
aucaggcacuccucaauug

SEQ ID NO: 7635 - RNA, 19 nt, Artificial Sequence
  synthetic
aaucaggcacuccucaauu

SEQ ID NO: 7636 - RNA, 19 nt, Artificial Sequence
  synthetic
uaaucaggcacuccucaau

SEQ ID NO: 7637 - RNA, 19 nt, Artificial Sequence
  synthetic
uuaaucaggcacuccucaa

SEQ ID NO: 7638 - RNA, 19 nt, Artificial Sequence
  synthetic
auuaaucaggcacuccuca

SEQ ID NO: 7639 - RNA, 19 nt, Artificial Sequence
  synthetic
cauuaaucaggcacuccuc

SEQ ID NO: 7640 - RNA, 19 nt, Artificial Sequence
  synthetic
ucauuaaucaggcacuccu

SEQ ID NO: 7641 - RNA, 19 nt, Artificial Sequence
  synthetic
aucauuaaucaggcacucc

SEQ ID NO: 7642 - RNA, 19 nt, Artificial Sequence
  synthetic
gaucauuaaucaggcacuc

SEQ ID NO: 7643 - RNA, 19 nt, Artificial Sequence
  synthetic
ggaucauuaaucaggcacu

SEQ ID NO: 7644 - RNA, 19 nt, Artificial Sequence
  synthetic
gggaucauuaaucaggcac

SEQ ID NO: 7645 - RNA, 19 nt, Artificial Sequence
  synthetic
agggaucauuaaucaggca

SEQ ID NO: 7646 - RNA, 19 nt, Artificial Sequence
  synthetic
cagggaucauuaaucaggc

SEQ ID NO: 7647 - RNA, 19 nt, Artificial Sequence
  synthetic
ccagggaucauuaaucagg

SEQ ID NO: 7648 - RNA, 19 nt, Artificial Sequence
  synthetic
cccagggaucauuaaucag

SEQ ID NO: 7649 - RNA, 19 nt, Artificial Sequence
  synthetic
acccagggaucauuaauca

SEQ ID NO: 7650 - RNA, 19 nt, Artificial Sequence
  synthetic
aacccagggaucauuaauc

SEQ ID NO: 7651 - RNA, 19 nt, Artificial Sequence
  synthetic
aaacccagggaucauuaau

SEQ ID NO: 7652 - RNA, 19 nt, Artificial Sequence
  synthetic
aaaacccagggaucauuaa

SEQ ID NO: 7653 - RNA, 19 nt, Artificial Sequence
  synthetic
caaaacccagggaucauua

SEQ ID NO: 7654 - RNA, 19 nt, Artificial Sequence
  synthetic
gcaaaacccagggaucauu

SEQ ID NO: 7655 - RNA, 19 nt, Artificial Sequence
  synthetic
agcaaaacccagggaucau

SEQ ID NO: 7656 - RNA, 19 nt, Artificial Sequence
  synthetic
gagcaaaacccagggauca

SEQ ID NO: 7657 - RNA, 19 nt, Artificial Sequence
  synthetic
ugagcaaaacccagggauc

SEQ ID NO: 7658 - RNA, 19 nt, Artificial Sequence
  synthetic
uugagcaaaacccagggau

SEQ ID NO: 7659 - RNA, 19 nt, Artificial Sequence
  synthetic
auugagcaaaacccaggga

SEQ ID NO: 7660 - RNA, 19 nt, Artificial Sequence
  synthetic
cauugagcaaaacccaggg

SEQ ID NO: 7661 - RNA, 19 nt, Artificial Sequence
  synthetic
gcauugagcaaaacccagg

SEQ ID NO: 7662 - RNA, 19 nt, Artificial Sequence
  synthetic
gaaccaagacgcauugagc

SEQ ID NO: 7663 - RNA, 19 nt, Artificial Sequence
  synthetic
ggaaggaguugaaccaaga

SEQ ID NO: 7664 - RNA, 19 nt, Artificial Sequence
  synthetic
aggaaggaguugaaccaag

SEQ ID NO: 7665 - RNA, 19 nt, Artificial Sequence
  synthetic
caggaaggaguugaaccaa

SEQ ID NO: 7666 - RNA, 19 nt, Artificial Sequence
  synthetic
ucaggaaggaguugaacca

SEQ ID NO: 7667 - RNA, 19 nt, Artificial Sequence
  synthetic
gucaggaaggaguugaacc

SEQ ID NO: 7668 - RNA, 19 nt, Artificial Sequence
  synthetic
ugucaggaaggaguugaac

SEQ ID NO: 7669 - RNA, 19 nt, Artificial Sequence
  synthetic
gugucaggaaggaguugaa

SEQ ID NO: 7670 - RNA, 19 nt, Artificial Sequence
  synthetic
ugugucaggaaggaguuga

SEQ ID NO: 7671 - RNA, 19 nt, Artificial Sequence
  synthetic
augugucaggaaggaguug

SEQ ID NO: 7672 - RNA, 19 nt, Artificial Sequence
  synthetic
caugugucaggaaggaguu

SEQ ID NO: 7673 - RNA, 19 nt, Artificial Sequence
  synthetic
gcaugugucaggaaggagu

SEQ ID NO: 7674 - RNA, 19 nt, Artificial Sequence
  synthetic
ugcaugugucaggaaggag

SEQ ID NO: 7675 - RNA, 19 nt, Artificial Sequence
  synthetic
augcaugugucaggaagga

SEQ ID NO: 7676 - RNA, 19 nt, Artificial Sequence
  synthetic
aaugcaugugucaggaagg

SEQ ID NO: 7677 - RNA, 19 nt, Artificial Sequence
  synthetic
uaaugcaugugucaggaag

SEQ ID NO: 7678 - RNA, 19 nt, Artificial Sequence
  synthetic
uuaaugcaugugucaggaa

SEQ ID NO: 7679 - RNA, 19 nt, Artificial Sequence
  synthetic
uuuaaugcaugugucagga

SEQ ID NO: 7680 - RNA, 19 nt, Artificial Sequence
  synthetic
uuuuaaugcaugugucagg

SEQ ID NO: 7681 - RNA, 19 nt, Artificial Sequence
  synthetic
auuuuaaugcaugugucag

SEQ ID NO: 7682 - RNA, 19 nt, Artificial Sequence
  synthetic
uauuuuaaugcauguguca

SEQ ID NO: 7683 - RNA, 19 nt, Artificial Sequence
  synthetic
cuauuuuaaugcauguguc

SEQ ID NO: 7684 - RNA, 19 nt, Artificial Sequence
  synthetic
acuauuuuaaugcaugugu

SEQ ID NO: 7685 - RNA, 19 nt, Artificial Sequence
  synthetic
aacuauuuuaaugcaugug

SEQ ID NO: 7686 - RNA, 19 nt, Artificial Sequence
  synthetic
ccauaacuauuuuaaugca

SEQ ID NO: 7687 - RNA, 19 nt, Artificial Sequence
  synthetic
uaacaaauaguagcacugc

SEQ ID NO: 7688 - RNA, 19 nt, Artificial Sequence
  synthetic
uuuuuuggacaguacggau

SEQ ID NO: 7689 - RNA, 19 nt, Artificial Sequence
  synthetic
auuucaucaaugaacaagg

SEQ ID NO: 7690 - RNA, 19 nt, Artificial Sequence
  synthetic
uucaacuccuuccugacac

SEQ ID NO: 7691 - RNA, 19 nt, Artificial Sequence
  synthetic
auggaagauuuugugcgac

SEQ ID NO: 7692 - RNA, 19 nt, Artificial Sequence
  synthetic
auccugugcagcaauggac

SEQ ID NO: 7693 - RNA, 19 nt, Artificial Sequence
  synthetic
aaaaauuugaaaucucagg

SEQ ID NO: 7694 - RNA, 19 nt, Artificial Sequence
  synthetic
aaauugagcauugaagacc

SEQ ID NO: 7695 - RNA, 19 nt, Artificial Sequence
  synthetic
aauugagcauugaagaccc

SEQ ID NO: 7696 - RNA, 19 nt, Artificial Sequence
  synthetic
auggauucgaaccgaacgg

SEQ ID NO: 7697 - RNA, 23 nt, Artificial Sequence
  synthetic
cugugcagcaauggacgauuuuc

SEQ ID NO: 7698 - RNA, 23 nt, Artificial Sequence
  synthetic
uuccugacacaugcauuaaaaua

SEQ ID NO: 7699 - RNA, 23 nt, Artificial Sequence
  synthetic
ugcacuguuaaagcacagauuug

SEQ ID NO: 7700 - RNA, 23 nt, Artificial Sequence
  synthetic
uccaaggacuaaaaacaugaaga

SEQ ID NO: 7701 - RNA, 23 nt, Artificial Sequence
  synthetic
ggcaccagagaaaguagacuuug

SEQ ID NO: 7702 - RNA, 23 nt, Artificial Sequence
  synthetic
guccacauauauuaccuugaaaa

SEQ ID NO: 7703 - RNA, 23 nt, Artificial Sequence
  synthetic
uucaaggccuauguucuuguaug

SEQ ID NO: 7704 - RNA, 23 nt, Artificial Sequence
  synthetic
aagcuggauacagaaugaguuca

SEQ ID NO: 7705 - DNA, 21 bp, Artificial Sequence
  synthetic
gugcagcaauggacgauuutt

SEQ ID NO: 7706 - DNA, 21 bp, Artificial Sequence
  synthetic
ccugacacaugcauuaaaatt

SEQ ID NO: 7707 - DNA, 21 bp, Artificial Sequence
  synthetic
cacuguuaaagcacagauutt

SEQ ID NO: 7708 - DNA, 21 bp, Artificial Sequence
  synthetic
caaggacuaaaaacaugaatt

SEQ ID NO: 7709 - DNA, 21 bp, Artificial Sequence
  synthetic
caccagagaaaguagacuutt

SEQ ID NO: 7710 - DNA, 21 bp, Artificial Sequence
  synthetic
ccacauauauuaccuugaatt

SEQ ID NO: 7711 - DNA, 21 bp, Artificial Sequence
  synthetic
caaggccuauguucuuguatt

SEQ ID NO: 7712 - DNA, 21 bp, Artificial Sequence
  synthetic
gcuggauacagaaugaguutt

SEQ ID NO: 7713 - DNA, 21 bp, Artificial Sequence
  synthetic
aaaucguccauugcugcactt

SEQ ID NO: 7714 - DNA, 21 bp, Artificial Sequence
  synthetic
uuuuaaugcaugugucaggtt

SEQ ID NO: 7715 - DNA, 21 bp, Artificial Sequence
  synthetic
aaucugugcuuuaacagugtt

SEQ ID NO: 7716 - DNA, 21 bp, Artificial Sequence
  synthetic
uucauguuuuuaguccuugtt

SEQ ID NO: 7717 - DNA, 21 bp, Artificial Sequence
  synthetic
aagucuacuuucucuggugtt

SEQ ID NO: 7718 - DNA, 21 bp, Artificial Sequence
  synthetic
uucaagguaauauauguggtt

SEQ ID NO: 7719 - DNA, 21 bp, Artificial Sequence
  synthetic
uacaagaacauaggccuugtt

SEQ ID NO: 7720 - DNA, 21 bp, Artificial Sequence
  synthetic
aacucauucuguauccagctt

SEQ ID NO: 7721 - DNA, 21 bp, Artificial Sequence
  synthetic
  misc_feature (1)..(1): 5'-3 attached deoxy abasic moiety
  misc_feature (2)..(2): 2'-deoxy-2'-fluoro
  misc_feature (4)..(4): 2'-deoxy-2'-fluoro
  misc_feature (7)..(7): 2'-deoxy-2'-fluoro
  misc_feature (10)..(10): 2'-deoxy-2'-fluoro
  misc_feature (14)..(14): 2'-deoxy-2'-fluoro
  misc_feature (17)..(19): 2'-deoxy-2'-fluoro
  misc_feature (21)..(21): 3'-3 attached deoxy abasic moiety
gugcagcaauggacgauuutt

SEQ ID NO: 7722 - DNA, 21 bp, Artificial Sequence
  synthetic
  misc_feature (1)..(1): 5'-3 attached deoxy abasic moiety
  misc_feature (1)..(3): 2'-deoxy-2'-fluoro
  misc_feature (6)..(6): 2'-deoxy-2'-fluoro
  misc_feature (8)..(8): 2'-deoxy-2'-fluoro
  misc_feature (10)..(10): 2'-deoxy-2'-fluoro
  misc_feature (12)..(12): 2'-deoxy-2'-fluoro
  misc_feature (14)..(15): 2'-deoxy-2'-fluoro
  misc_feature (21)..(21): 3'-3 attached deoxy abasic moiety
ccugacacaugcauuaaaatt

SEQ ID NO: 7723 - DNA, 21 bp, Artificial Sequence
  synthetic
  misc_feature (1)..(1): 5'-3 attached deoxy abasic moiety
  misc_feature (1)..(1): 2'-deoxy-2'-fluoro
  misc_feature (3)..(4): 2'-deoxy-2'-fluoro
  misc_feature (6)..(7): 2'-deoxy-2'-fluoro
  misc_feature (12)..(12): 2'-deoxy-2'-fluoro
  misc_feature (14)..(14): 2'-deoxy-2'-fluoro
  misc_feature (18)..(19): 2'-deoxy-2'-fluoro
  misc_feature (21)..(21): 3'-3 attached deoxy abasic moiety
cacuguuaaagcacagauutt

SEQ ID NO: 7724 - DNA, 21 bp, Artificial Sequence
  synthetic
  misc_feature (1)..(1): 5'-3 attached deoxy abasic moiety
  misc_feature (1)..(1): 2'-deoxy-2'-fluoro
  misc_feature (7)..(8): 2'-deoxy-2'-fluoro
  misc_feature (14)..(14): 2'-deoxy-2'-fluoro
  misc_feature (16)..(16): 2'-deoxy-2'-fluoro
  misc_feature (21)..(21): 3'-3 attached deoxy abasic moiety
caaggacuaaaaacaugaatt

SEQ ID NO: 7725 - DNA, 21 bp, Artificial Sequence
  synthetic
  misc_feature (1)..(1): 5'-3 attached deoxy abasic moiety
  misc_feature (1)..(1): 2'-deoxy-2'-fluoro
  misc_feature (3)..(4): 2'-deoxy-2'-fluoro
  misc_feature (13)..(13): 2'-deoxy-2'-fluoro
  misc_feature (17)..(19): 2'-deoxy-2'-fluoro
  misc_feature (21)..(21): 3'-3 attached deoxy abasic moiety
caccagagaaaguagacuutt

SEQ ID NO: 7726 - DNA, 21 bp, Artificial Sequence
  synthetic
  misc_feature (1)..(1): 5'-3 attached deoxy abasic moiety
  misc_feature (1)..(2): 2'-deoxy-2'-fluoro
  misc_feature (4)..(4): 2'-deoxy-2'-fluoro
  misc_feature (6)..(6): 2'-deoxy-2'-fluoro
  misc_feature (8)..(8): 2'-deoxy-2'-fluoro
  misc_feature (10)..(11): 2'-deoxy-2'-fluoro
  misc_feature (13)..(16): 2'-deoxy-2'-fluoro
  misc_feature (21)..(21): 3'-3 attached deoxy abasic moiety
ccacauauauuaccuugaatt

SEQ ID NO: 7727 - DNA, 21 bp, Artificial Sequence
  synthetic
  misc_feature (1)..(1): 5'-3 attached deoxy abasic moiety
  misc_feature (1)..(1): 2'-deoxy-2'-fluoro
  misc_feature (6)..(8): 2'-deoxy-2'-fluoro
  misc_feature (10)..(10): 2'-deoxy-2'-fluoro
  misc_feature (12)..(16): 2'-deoxy-2'-fluoro
  misc_feature (18)..(18): 2'-deoxy-2'-fluoro
  misc_feature (21)..(21): 3'-3 attached deoxy abasic moiety
caaggccuauguucuuguatt

SEQ ID NO: 7728 - DNA, 21 bp, Artificial Sequence
  synthetic
  misc_feature (1)..(1): 5'-3 attached deoxy abasic moiety
  misc_feature (2)..(3): 2'-deoxy-2'-fluoro
  misc_feature (7)..(7): 2'-deoxy-2'-fluoro
  misc_feature (9)..(9): 2'-deoxy-2'-fluoro
  misc_feature (14)..(14): 2'-deoxy-2'-fluoro
  misc_feature (18)..(19): 2'-deoxy-2'-fluoro
  misc_feature (21)..(21): 3'-3 attached deoxy abasic moiety
gcuggauacagaaugaguutt

SEQ ID NO: 7729 - DNA, 21 bp, Artificial Sequence
  synthetic
  misc_feature (1)..(19): ribonucleotide
  misc_feature (4)..(5): 2'-deoxy-2'-fluoro
  misc_feature (7)..(9): 2'-deoxy-2'-fluoro
  misc_feature (11)..(12): 2'-deoxy-2'-fluoro
  misc_feature (14)..(15): 2'-deoxy-2'-fluoro
  misc_feature (17)..(17): 2'-deoxy-2'-fluoro
  misc_feature (19)..(19): 2'-deoxy-2'-fluoro
  misc_feature (20)..(21): phosphorothioate linkage
aaaucguccauugcugcactt

SEQ ID NO: 7730 - DNA, 21 bp, Artificial Sequence
  synthetic
  misc_feature (1)..(19): ribonucleotide
  misc_feature (1)..(4): 2'-deoxy-2'-fluoro
  misc_feature (7)..(7): 2'-deoxy-2'-fluoro
  misc_feature (9)..(9): 2'-deoxy-2'-fluoro
  misc_feature (11)..(11): 2'-deoxy-2'-fluoro
  misc_feature (13)..(13): 2'-deoxy-2'-fluoro
  misc_feature (15)..(16): 2'-deoxy-2'-fluoro
  misc_feature (20)..(21): phosphorothioate linkage
uuuuaaugcaugugucaggtt

SEQ ID NO: 7731 - DNA, 21 bp, Artificial Sequence
  synthetic
  misc_feature (1)..(19): ribonucleotide
  misc_feature (3)..(5): 2'-deoxy-2'-fluoro
  misc_feature (7)..(7): 2'-deoxy-2'-fluoro
  misc_feature (9)..(12): 2'-deoxy-2'-fluoro
  misc_feature (15)..(15): 2'-deoxy-2'-fluoro
  misc_feature (18)..(18): 2'-deoxy-2'-fluoro
  misc_feature (20)..(21): phosphorothioate linkage
aaucugugcuuuaacagugtt

SEQ ID NO: 7732 - DNA, 21 bp, Artificial Sequence
  synthetic
  misc_feature (1)..(19): ribonucleotide
  misc_feature (1)..(3): 2'-deoxy-2'-fluoro
  misc_feature (5)..(5): 2'-deoxy-2'-fluoro
  misc_feature (7)..(11): 2'-deoxy-2'-fluoro
  misc_feature (14)..(18): 2'-deoxy-2'-fluoro
  misc_feature (20)..(21): phosphorothioate linkage
uucauguuuuuaguccuugtt

SEQ ID NO: 7733 - DNA, 21 bp, Artificial Sequence
  synthetic
  misc_feature (1)..(19): ribonucleotide
  misc_feature (4)..(6): 2'-deoxy-2'-fluoro
  misc_feature (8)..(15): 2'-deoxy-2'-fluoro
  misc_feature (18)..(18): 2'-deoxy-2'-fluoro
  misc_feature (20)..(21): phosphorothioate linkage
aagucuacuuucucuggugtt

SEQ ID NO: 7734 - DNA, 21 bp, Artificial Sequence
  synthetic
  misc_feature (1)..(19): ribonucleotide
  misc_feature (1)..(3): 2'-deoxy-2'-fluoro
  misc_feature (8)..(8): 2'-deoxy-2'-fluoro
  misc_feature (11)..(11): 2'-deoxy-2'-fluoro
  misc_feature (13)..(13): 2'-deoxy-2'-fluoro
  misc_feature (15)..(15): 2'-deoxy-2'-fluoro
  misc_feature (17)..(17): 2'-deoxy-2'-fluoro
  misc_feature (20)..(21): phosphorothioate linkage
uucaagguaauauauguggtt

SEQ ID NO: 7735 - DNA, 21 bp, Artificial Sequence
  synthetic
  misc_feature (1)..(19): ribonucleotide
  misc_feature (1)..(1): 2'-deoxy-2'-fluoro
  misc_feature (3)..(3): 2'-deoxy-2'-fluoro
  misc_feature (9)..(9): 2'-deoxy-2'-fluoro
  misc_feature (11)..(11): 2'-deoxy-2'-fluoro
  misc_feature (15)..(18): 2'-deoxy-2'-fluoro
  misc_feature (20)..(21): phosphorothioate linkage
uacaagaacauaggccuugtt

SEQ ID NO: 7736 - DNA, 21 bp, Artificial Sequence
  synthetic
  misc_feature (1)..(19): ribonucleotide
  misc_feature (3)..(5): 2'-deoxy-2'-fluoro
  misc_feature (7)..(10): 2'-deoxy-2'-fluoro
  misc_feature (12)..(12): 2'-deoxy-2'-fluoro
  misc_feature (14)..(16): 2'-deoxy-2'-fluoro
  misc_feature (19)..(19): 2'-deoxy-2'-fluoro
  misc_feature (20)..(21): phosphorothioate linkage
aacucauucuguauccagctt

SEQ ID NO: 7737 - DNA, 21 bp, Artificial Sequence
  synthetic
  misc_feature (1)..(1): 5'-3 attached deoxy abasic moiety
  misc_feature (1)..(19): ribonucleotide
  misc_feature (1)..(1): deoxy
  misc_feature (2)..(2): 2'-deoxy-2'-fluoro
  misc_feature (3)..(3): deoxy
  misc_feature (4)..(4): 2'-deoxy-2'-fluoro
  misc_feature (5)..(6): deoxy
  misc_feature (7)..(7): 2'-deoxy-2'-fluoro
  misc_feature (8)..(9): deoxy
  misc_feature (10)..(10): 2'-deoxy-2'-fluoro
  misc_feature (11)..(13): deoxy
  misc_feature (14)..(14): 2'-deoxy-2'-fluoro
  misc_feature (15)..(16): deoxy
  misc_feature (17)..(19): 2'-deoxy-2'-fluoro
  misc_feature (21)..(21): 3'-3 attached deoxy abasic moiety
gugcagcaauggacgauuutt

SEQ ID NO: 7738 - DNA, 21 bp, Artificial Sequence
  synthetic
  misc_feature (1)..(1): 5'-3 attached deoxy abasic moiety
  misc_feature (1)..(19): ribonucleotide
  misc_feature (1)..(3): 2'-deoxy-2'-fluoro
  misc_feature (4)..(5): deoxy
  misc_feature (6)..(6): 2'-deoxy-2'-fluoro
  misc_feature (7)..(7): deoxy
  misc_feature (8)..(8): 2'-deoxy-2'-fluoro
  misc_feature (9)..(9): deoxy
  misc_feature (10)..(10): 2'-deoxy-2'-fluoro
  misc_feature (11)..(11): deoxy
  misc_feature (12)..(12): 2'-deoxy-2'-fluoro
  misc_feature (13)..(13): deoxy
  misc_feature (14)..(15): 2'-deoxy-2'-fluoro
  misc_feature (16)..(19): deoxy
  misc_feature (21)..(21): 3'-3 attached deoxy abasic moiety
ccugacacaugcauuaaaatt

SEQ ID NO: 7739 - DNA, 21 bp, Artificial Sequence
  synthetic
  misc_feature (1)..(1): 5'-3 attached deoxy abasic moiety
  misc_feature (1)..(1): 2'-deoxy-2'-fluoro
  misc_feature (2)..(2): deoxy
  misc_feature (3)..(4): 2'-deoxy-2'-fluoro
  misc_feature (5)..(5): deoxy
  misc_feature (6)..(7): 2'-deoxy-2'-fluoro
  misc_feature (8)..(11): deoxy
  misc_feature (12)..(12): 2'-deoxy-2'-fluoro
  misc_feature (13)..(13): deoxy
  misc_feature (14)..(14): 2'-deoxy-2'-fluoro
  misc_feature (15)..(17): deoxy
  misc_feature (18)..(19): 2'-deoxy-2'-fluoro
  misc_feature (21)..(21): 3'-3 attached deoxy abasic moiety
cacuguuaaagcacagauutt

SEQ ID NO: 7740 - DNA, 21 bp, Artificial Sequence
  synthetic
  misc_feature (1)..(1): 5'-3 attached deoxy abasic moiety
  misc_feature (1)..(1): 2'-deoxy-2'-fluoro
  misc_feature (2)..(6): deoxy
  misc_feature (7)..(8): 2'-deoxy-2'-fluoro
  misc_feature (9)..(13): deoxy
  misc_feature (14)..(14): 2'-deoxy-2'-fluoro
  misc_feature (15)..(15): deoxy
  misc_feature (16)..(16): 2'-deoxy-2'-fluoro
  misc_feature (17)..(19): deoxy
  misc_feature (21)..(21): 3'-3 attached deoxy abasic moiety
caaggacuaaaaacaugaatt

SEQ ID NO: 7741 - DNA, 21 bp, Artificial Sequence
  synthetic
  misc_feature (1)..(1): 5'-3 attached deoxy abasic moiety
  misc_feature (1)..(1): 2'-deoxy-2'-fluoro
  misc_feature (2)..(2): deoxy
  misc_feature (3)..(4): 2'-deoxy-2'-fluoro
  misc_feature (5)..(12): deoxy
  misc_feature (13)..(13): 2'-deoxy-2'-fluoro
  misc_feature (14)..(16): deoxy
  misc_feature (17)..(19): 2'-deoxy-2'-fluoro
  misc_feature (21)..(21): 3'-3 attached deoxy abasic moiety
caccagagaaaguagacuutt

SEQ ID NO: 7742 - DNA, 21 bp, Artificial Sequence
  synthetic
  misc_feature (1)..(1): 5'-3 attached deoxy abasic moiety
  misc_feature (1)..(2): 2'-deoxy-2'-fluoro
  misc_feature (3)..(3): deoxy
  misc_feature (4)..(4): 2'-deoxy-2'-fluoro
  misc_feature (5)..(5): deoxy
  misc_feature (6)..(6): 2'-deoxy-2'-fluoro
  misc_feature (7)..(7): deoxy
  misc_feature (8)..(8): 2'-deoxy-2'-fluoro
  misc_feature (9)..(9): deoxy
  misc_feature (10)..(11): 2'-deoxy-2'-fluoro
  misc_feature (12)..(12): deoxy
  misc_feature (13)..(16): 2'-deoxy-2'-fluoro
  misc_feature (17)..(19): deoxy
  misc_feature (21)..(21): 3'-3 attached deoxy abasic moiety
ccacauauauuaccuugaatt

SEQ ID NO: 7743 - DNA, 21 bp, Artificial Sequence
  synthetic
  misc_feature (1)..(1): 5'-3 attached deoxy abasic moiety
  misc_feature (1)..(1): 2'-deoxy-2'-fluoro
  misc_feature (2)..(5): deoxy
  misc_feature (6)..(8): 2'-deoxy-2'-fluoro
  misc_feature (9)..(9): deoxy
  misc_feature (10)..(10): 2'-deoxy-2'-fluoro
  misc_feature (11)..(11): deoxy
  misc_feature (12)..(16): 2'-deoxy-2'-fluoro
  misc_feature (17)..(17): deoxy
  misc_feature (18)..(18): 2'-deoxy-2'-fluoro
  misc_feature (19)..(19): deoxy
  misc_feature (21)..(21): 3'-3 attached deoxy abasic moiety
caaggccuauguucuuguatt

SEQ ID NO: 7744 - DNA, 21 bp, Artificial Sequence
  synthetic
  misc_feature (1)..(1): 5'-3 attached deoxy abasic moiety
  misc_feature (1)..(1): deoxy
  misc_feature (2)..(3): 2'-deoxy-2'-fluoro
  misc_feature (4)..(6): deoxy
  misc_feature (7)..(7): 2'-deoxy-2'-fluoro
  misc_feature (8)..(8): deoxy
  misc_feature (9)..(9): 2'-deoxy-2'-fluoro
  misc_feature (10)..(13): deoxy
  misc_feature (14)..(14): 2'-deoxy-2'-fluoro
  misc_feature (15)..(17): deoxy
  misc_feature (18)..(19): 2'-deoxy-2'-fluoro
  misc_feature (21)..(21): 3'-3 attached deoxy abasic moiety
gcuggauacagaaugaguutt

SEQ ID NO: 7745 - DNA, 21 bp, Artificial Sequence
  synthetic
  misc_feature (1)..(3): deoxy
  misc_feature (4)..(5): 2'-deoxy-2'-fluoro
  misc_feature (6)..(6): deoxy
  misc_feature (7)..(9): 2'-deoxy-2'-fluoro
  misc_feature (10)..(10): deoxy
  misc_feature (11)..(12): 2'-deoxy-2'-fluoro
  misc_feature (13)..(13): deoxy
  misc_feature (14)..(15): 2'-deoxy-2'-fluoro
  misc_feature (16)..(16): deoxy
  misc_feature (17)..(17): 2'-deoxy-2'-fluoro
  misc_feature (18)..(18): deoxy
  misc_feature (19)..(19): 2'-deoxy-2'-fluoro
  misc_feature (20)..(21): phosphorothioate linkage
aaaucguccauugcugcactt

SEQ ID NO: 7746 - DNA, 21 bp, Artificial Sequence
  synthetic
  misc_feature (1)..(4): 2'-deoxy-2'-fluoro
  misc_feature (5)..(6): deoxy
  misc_feature (7)..(7): 2'-deoxy-2'-fluoro
  misc_feature (8)..(8): deoxy
  misc_feature (9)..(9): 2'-deoxy-2'-fluoro
  misc_feature (10)..(10): deoxy
  misc_feature (11)..(11): 2'-deoxy-2'-fluoro
  misc_feature (12)..(12): deoxy
  misc_feature (13)..(13): 2'-deoxy-2'-fluoro
  misc_feature (14)..(14): deoxy
  misc_feature (15)..(16): 2'-deoxy-2'-fluoro
  misc_feature (17)..(19): deoxy
  misc_feature (20)..(21): phosphorothoiate linkage
uuuuaaugcaugugucaggtt

SEQ ID NO: 7747 - DNA, 21 bp, Artificial Sequence
  synthetic
  misc_feature (1)..(2): deoxy
  misc_feature (3)..(5): 2'-deoxy-2'-fluoro
  misc_feature (6)..(6): deoxy
  misc_feature (7)..(7): 2'-deoxy-2'-fluoro
  misc_feature (8)..(8): deoxy
  misc_feature (9)..(12): 2'-deoxy-2'-fluoro
  misc_feature (13)..(14): deoxy
  misc_feature (15)..(15): 2'-deoxy-2'-fluoro
  misc_feature (16)..(17): deoxy
  misc_feature (18)..(18): 2'-deoxy-2'-fluoro
  misc_feature (19)..(19): deoxy
  misc_feature (20)..(21): phosphorothioate linkage
aaucugugcuuuaacagugtt

SEQ ID NO: 7748 - DNA, 21 bp, Artificial Sequence
  synthetic
  misc_feature (1)..(3): 2'-deoxy-2'-fluoro
  misc_feature (4)..(4): deoxy
  misc_feature (5)..(5): 2'-deoxy-2'-fluoro
  misc_feature (6)..(6): deoxy
  misc_feature (7)..(11): 2'-deoxy-2'-fluoro
  misc_feature (12)..(13): deoxy
  misc_feature (14)..(18): 2'-deoxy-2'-fluoro
  misc_feature (19)..(19): deoxy
  misc_feature (20)..(21): phosphorothioate linkage
uucauguuuuuaguccuugtt

SEQ ID NO: 7749 - DNA, 21 bp, Artificial Sequence
  synthetic
  misc_feature (1)..(3): deoxy
  misc_feature (4)..(6): 2'-deoxy-2'-fluoro
  misc_feature (7)..(7): deoxy
  misc_feature (8)..(15): 2'-deoxy-2'-fluoro
  misc_feature (16)..(17): deoxy
  misc_feature (18)..(18): 2'-deoxy-2'-fluoro
  misc_feature (19)..(19): deoxy
  misc_feature (20)..(21): phosphorothioate linkage
aagucuacuuucucuggugtt

SEQ ID NO: 7750 - DNA, 21 bp, Artificial Sequence
  synthetic
  misc_feature (1)..(3): 2'-deoxy-2'-fluoro
  misc_feature (4)..(7): deoxy
  misc_feature (8)..(8): 2'-deoxy-2'-fluoro
  misc_feature (9)..(10): deoxy
  misc_feature (11)..(11): 2'-deoxy-2'-fluoro
  misc_feature (12)..(12): deoxy
  misc_feature (13)..(13): 2'-deoxy-2'-fluoro
  misc_feature (14)..(14): deoxy
  misc_feature (15)..(15): 2'-deoxy-2'-fluoro
  misc_feature (16)..(16): deoxy
  misc_feature (17)..(17): 2'-deoxy-2'-fluoro
  misc_feature (18)..(19): deoxy
  misc_feature (20)..(21): phosphorothioate linkage
uucaagguaauauauguggtt

SEQ ID NO: 7751 - DNA, 21 bp, Artificial Sequence
  synthetic
  misc_feature (1)..(1): 2'-deoxy-2'-fluoro
  misc_feature (2)..(2): deoxy
  misc_feature (3)..(3): 2'-deoxy-2'-fluoro
  misc_feature (4)..(8): deoxy
  misc_feature (9)..(9): 2'-deoxy-2'-fluoro
  misc_feature (10)..(10): deoxy
  misc_feature (11)..(11): 2'-deoxy-2'-fluoro
  misc_feature (12)..(14): deoxy
  misc_feature (15)..(18): 2'-deoxy-2'-fluoro
  misc_feature (19)..(19): deoxy
  misc_feature (20)..(21): phosphorothioate linkage
uacaagaacauaggccuugtt

SEQ ID NO: 7752 - DNA, 21 bp, Artificial Sequence
  synthetic
  misc_feature (1)..(2): deoxy
  misc_feature (3)..(5): 2'-deoxy-2'-fluoro
  misc_feature (6)..(6): deoxy
  misc_feature (7)..(10): 2'-deoxy-2'-fluoro
  misc_feature (11)..(11): deoxy
  misc_feature (12)..(12): 2'-deoxy-2'-fluoro
  misc_feature (13)..(13): deoxy
  misc_feature (14)..(16): 2'-deoxy-2'-fluoro
  misc_feature (17)..(18): deoxy
  misc_feature (19)..(19): 2'-deoxy-2'-fluoro
  misc_feature (20)..(21): phosphorothioate linkage
aacucauucuguauccagctt

SEQ ID NO: 7753 - DNA, 21 bp, Artificial Sequence
  synthetic
  misc_feature (1)..(1): 5'-3 attached deoxy abasic moiety
  misc_feature (1)..(1): 2'-O-methyl
  misc_feature (2)..(2): 2'-deoxy-2'-fluoro
  misc_feature (3)..(3): 2'-O-methyl
  misc_feature (4)..(4): 2'-deoxy-2'-fluoro
  misc_feature (5)..(6): 2'-O-methyl
  misc_feature (7)..(7): 2'-deoxy-2'-fluoro
  misc_feature (8)..(9): 2'-O-methyl
  misc_feature (10)..(10): 2'-deoxy-2'-fluoro
  misc_feature (11)..(13): 2'-O-methyl
  misc_feature (14)..(14): 2'-deoxy-2'-fluoro
  misc_feature (15)..(16): 2'-O-methyl
  misc_feature (17)..(19): 2'-deoxy-2'-fluoro
  misc_feature (21)..(21): 3'-3 attached deoxy abasic moiety
gugcagcaauggacgauuutt

SEQ ID NO: 7754 - DNA, 21 bp, Artificial Sequence
  synthetic
  misc_feature (1)..(1): 5'-3 attached deoxy abasic moiety
  misc_feature (1)..(3): 2'-deoxy-2'-fluoro
  misc_feature (4)..(5): 2'-O-methyl
  misc_feature (6)..(6): 2'-deoxy-2'-fluoro
  misc_feature (7)..(7): 2'-O-methyl
  misc_feature (8)..(8): 2'-deoxy-2'-fluoro
  misc_feature (9)..(9): 2'-O-methyl
  misc_feature (10)..(10): 2'-deoxy-2'-fluoro
  misc_feature (11)..(11): 2'-O-methyl
  misc_feature (12)..(12): 2'-deoxy-2'-fluoro
  misc_feature (13)..(13): 2'-O-methyl
  misc_feature (14)..(15): 2'-deoxy-2'-fluoro
  misc_feature (16)..(19): 2'-O-methyl
  misc_feature (21)..(21): 3'-3 attached deoxy abasic moiety
ccugacacaugcauuaaaatt

SEQ ID NO: 7755 - DNA, 21 bp, Artificial Sequence
  synthetic
  misc_feature (1)..(1): 5'-3 attached deoxy abasic moiety
  misc_feature (1)..(1): 2'-deoxy-2'-fluoro
  misc_feature (2)..(2): 2'-O-methyl
  misc_feature (3)..(4): 2'-deoxy-2'-fluoro
  misc_feature (5)..(5): 2'-O-methyl
  misc_feature (6)..(7): 2'-deoxy-2'-fluoro
  misc_feature (8)..(11): 2'-O-methyl
  misc_feature (12)..(12): 2'-deoxy-2'-fluoro
  misc_feature (13)..(13): 2'-O-methyl
  misc_feature (14)..(14): 2'-deoxy-2'-fluoro
  misc_feature (15)..(17): 2'-O-methyl
  misc_feature (18)..(19): 2'-deoxy-2'-fluoro
  misc_feature (21)..(21): 3'-3 attached deoxy abasic moiety
cacuguuaaagcacagauutt

SEQ ID NO: 7756 - DNA, 21 bp, Artificial Sequence
  synthetic
  misc_feature (1)..(1): 5'-3 attached deoxy abasic moiety
  misc_feature (1)..(1): 2'-deoxy-2'-fluoro
  misc_feature (2)..(6): 2'-O-methyl
  misc_feature (7)..(8): 2'-deoxy-2'-fluoro
  misc_feature (9)..(13): 2'-O-methyl
  misc_feature (14)..(14): 2'-deoxy-2'-fluoro
  misc_feature (15)..(15): 2'-O-methyl
  misc_feature (16)..(16): 2'-deoxy-2'-fluoro
  misc_feature (17)..(19): 2'-O-methyl
  misc_feature (21)..(21): 3'-3 attached deoxy abasic moiety
caaggacuaaaaacaugaatt

SEQ ID NO: 7757 - DNA, 21 bp, Artificial Sequence
  synthetic
  misc_feature (1)..(1): 5'-3 attached deoxy abasic moiety
  misc_feature (1)..(1): 2'-deoxy-2'-fluoro
  misc_feature (2)..(2): 2'-O-methyl
  misc_feature (3)..(4): 2'-deoxy-2'-fluoro
  misc_feature (4)..(12): 2'-O-methyl
  misc_feature (13)..(13): 2'-deoxy-2'-fluoro
  misc_feature (14)..(16): 2'-O-methyl
  misc_feature (17)..(19): 2'-deoxy-2'-fluoro
  misc_feature (21)..(21): 3'-3 attached deoxy abasic moiety
caccagagaaaguagacuutt

SEQ ID NO: 7758 - DNA, 21 bp, Artificial Sequence
  synthetic
  misc_feature (1)..(1): 5'-3 attached deoxy abasic moiety
  misc_feature (1)..(2): 2'-deoxy-2'-fluoro
  misc_feature (3)..(3): 2'-O-methyl
  misc_feature (4)..(4): 2'-deoxy-2'-fluoro
  misc_feature (5)..(5): 2'-O-methyl
  misc_feature (6)..(6): 2'-deoxy-2'-fluoro
  misc_feature (7)..(7): 2'-O-methyl
  misc_feature (8)..(8): 2'-deoxy-2'-fluoro
  misc_feature (9)..(9): 2'-O-methyl
  misc_feature (10)..(11): 2'-deoxy-2'-fluoro
  misc_feature (12)..(12): 2'-O-methyl
  misc_feature (13)..(16): 2'-deoxy-2'-fluoro
  misc_feature (17)..(19): 2'-O-methyl
  misc_feature (21)..(21): 3'-3 attached deoxy abasic moiety
ccacauauauuaccuugaatt

SEQ ID NO: 7759 - DNA, 21 bp, Artificial Sequence
  synthetic
  misc_feature (1)..(1): 5'-3 attached deoxy abasic moiety
  misc_feature (1)..(1): 2'-deoxy-2'-fluoro
  misc_feature (2)..(5): 2'-O-methyl
  misc_feature (6)..(8): 2'-deoxy-2'-fluoro
  misc_feature (9)..(9): 2'-O-methyl
  misc_feature (10)..(10): 2'-deoxy-2'-fluoro
  misc_feature (11)..(11): 2'-O-methyl
  misc_feature (12)..(16): 2'-deoxy-2'-fluoro
  misc_feature (17)..(17): 2'-O-methyl
  misc_feature (18)..(18): 2'-deoxy-2'-fluoro
  misc_feature (19)..(19): 2'-O-methyl
  misc_feature (21)..(21): 3'-3 attached deoxy abasic moiety
caaggccuauguucuuguatt

SEQ ID NO: 7760 - DNA, 21 bp, Artificial Sequence
  synthetic
  misc_feature (1)..(1): 5'-3 attached deoxy abasic moiety
  misc_feature (1)..(1): 2'-O-methyl
  misc_feature (2)..(3): 2'-deoxy-2'-fluoro
  misc_feature (4)..(6): 2'-O-methyl
  misc_feature (7)..(7): 2'-deoxy-2'-fluoro
  misc_feature (8)..(8): 2'-O-methyl
  misc_feature (9)..(9): 2'-deoxy-2'-fluoro
  misc_feature (10)..(13): 2'-O-methyl
  misc_feature (14)..(14): 2'-deoxy-2'-fluoro
  misc_feature (15)..(17): 2'-O-methyl
  misc_feature (18)..(19): 2'-deoxy-2'-fluoro
  misc_feature (21)..(21): 3'-3 attached deoxy abasic moiety
gcuggauacagaaugaguutt

SEQ ID NO: 7761 - DNA, 21 bp, Artificial Sequence
  synthetic
  misc_feature (1)..(3): 2'-O-methyl
  misc_feature (4)..(5): 2'-deoxy-2'-fluoro
  misc_feature (6)..(6): 2'-O-methyl
  misc_feature (7)..(9): 2'-deoxy-2'-fluoro
  misc_feature (10)..(10): 2'-O-methyl
  misc_feature (11)..(12): 2'-deoxy-2'-fluoro
  misc_feature (13)..(13): 2'-O-methyl
  misc_feature (14)..(15): 2'-deoxy-2'-fluoro
  misc_feature (16)..(16): 2'-O-methyl
  misc_feature (17)..(17): 2'-deoxy-2'-fluoro
  misc_feature (18)..(18): 2'-O-methyl
  misc_feature (19)..(19): 2'-deoxy-2'-fluoro
  misc_feature (20)..(21): phosphorothioate linkage
aaaucguccauugcugcactt

SEQ ID NO: 7762 - DNA, 21 bp, Artificial Sequence
  synthetic
  misc_feature (1)..(4): 2'-deoxy-2'-fluoro
  misc_feature (5)..(6): 2'-O-methyl
  misc_feature (7)..(7): 2'-deoxy-2'-fluoro
  misc_feature (8)..(8): 2'-O-methyl
  misc_feature (9)..(9): 2'-deoxy-2'-fluoro
  misc_feature (10)..(10): 2'-O-methyl
  misc_feature (11)..(11): 2'-deoxy-2'-fluoro
  misc_feature (12)..(12): 2'-O-methyl
  misc_feature (13)..(13): 2'-deoxy-2'-fluoro
  misc_feature (14)..(14): 2'-O-methyl
  misc_feature (15)..(16): 2'-deoxy-2'-fluoro
  misc_feature (17)..(19): 2'-O-methyl
  misc_feature (20)..(21): phosphorothioate linkage
uuuuaaugcaugugucaggtt

SEQ ID NO: 7763 - DNA, 21 bp, Artificial Sequence
  synthetic
  misc_feature (1)..(2): 2'-O-methyl
  misc_feature (3)..(5): 2'-deoxy-2'-fluoro
  misc_feature (6)..(6): 2'-O-methyl
  misc_feature (7)..(7): 2'-deoxy-2'-fluoro
  misc_feature (8)..(8): 2'-O-methyl
  misc_feature (9)..(12): 2'-deoxy-2'-fluoro
  misc_feature (13)..(14): 2'-O-methyl
  misc_feature (15)..(15): 2'-deoxy-2'-fluoro
  misc_feature (16)..(17): 2'-O-methyl
  misc_feature (18)..(18): 2'-deoxy-2'-fluoro
  misc_feature (19)..(19): 2'-O-methyl
  misc_feature (20)..(21): phosphorothioate linkage
aaucugugcuuuaacagugtt

SEQ ID NO: 7764 - DNA, 21 bp, Artificial Sequence
  synthetic
  misc_feature (1)..(3): 2'-deoxy-2'-fluoro
  misc_feature (4)..(4): 2'-O-methyl
  misc_feature (5)..(5): 2'-deoxy-2'-fluoro
  misc_feature (6)..(6): 2'-O-methyl
  misc_feature (7)..(11): 2'-deoxy-2'-fluoro
  misc_feature (12)..(13): 2'-O-methyl
  misc_feature (14)..(18): 2'-deoxy-2'-fluoro
  misc_feature (19)..(19): 2'-O-methyl
  misc_feature (20)..(21): phosphorothioate linkage
uucauguuuuuaguccuugtt

SEQ ID NO: 7765 - DNA, 21 bp, Artificial Sequence
  synthetic
  misc_feature (1)..(3): 2'-O-methyl
  misc_feature (4)..(6): 2'-deoxy-2'-fluoro
  misc_feature (7)..(7): 2'-O-methyl
  misc_feature (8)..(15): 2'-deoxy-2'-fluoro
  misc_feature (16)..(17): 2'-O-methyl
  misc_feature (18)..(18): 2'-deoxy-2'-fluoro
  misc_feature (19)..(19): 2'-O-methyl
  misc_feature (20)..(21): phosphorothioate linkage
aagucuacuuucucuggugtt

SEQ ID NO: 7766 - DNA, 21 bp, Artificial Sequence
  synthetic
  misc_feature (1)..(3): 2'-deoxy-2'-fluoro
  misc_feature (4)..(7): 2'-O-methyl
  misc_feature (8)..(8): 2'-deoxy-2'-fluoro
  misc_feature (9)..(10): 2'-O-methyl
  misc_feature (11)..(11): 2'-deoxy-2'-fluoro
  misc_feature (12)..(12): 2'-O-methyl
  misc_feature (13)..(13): 2'-deoxy-2'-fluoro
  misc_feature (14)..(14): 2'-O-methyl
  misc_feature (15)..(15): 2'-deoxy-2'-fluoro
  misc_feature (16)..(16): 2'-O-methyl
  misc_feature (17)..(17): 2'-deoxy-2'-fluoro
  misc_feature (18)..(19): 2'-O-methyl
  misc_feature (20)..(21): phosphorothioate linkage
uucaagguaauauauguggtt

SEQ ID NO: 7767 - DNA, 21 bp, Artificial Sequence
  synthetic
  misc_feature (1)..(1): 2'-deoxy-2'-fluoro
  misc_feature (2)..(2): 2'-O-methyl
  misc_feature (3)..(3): 2'-deoxy-2'-fluoro
  misc_feature (4)..(8): 2'-O-methyl
  misc_feature (9)..(9): 2'-deoxy-2'-fluoro
  misc_feature (10)..(10): 2'-O-methyl
  misc_feature (11)..(11): 2'-deoxy-2'-fluoro
  misc_feature (12)..(14): 2'-O-methyl
  misc_feature (15)..(18): 2'-deoxy-2'-fluoro
  misc_feature (19)..(19): 2'-O-methyl
  misc_feature (20)..(21): phosphorothioate linkage
uacaagaacauaggccuugtt

SEQ ID NO: 7768 - DNA, 21 bp, Artificial Sequence
  synthetic
  misc_feature (1)..(2): 2'-O-methyl
  misc_feature (3)..(5): 2'-deoxy-2'-fluoro
  misc_feature (6)..(6): 2'-O-methyl
  misc_feature (7)..(10): 2'-deoxy-2'-fluoro
  misc_feature (11)..(11): 2'-O-methyl
  misc_feature (12)..(12): 2'-deoxy-2'-fluoro
  misc_feature (13)..(13): 2'-O-methyl
  misc_feature (14)..(16): 2'-deoxy-2'-fluoro
  misc_feature (17)..(18): 2'-O-methyl
  misc_feature (19)..(19): 2'-deoxy-2'-fluoro
  misc_feature (20)..(21): phosphorothioate linkage
aacucauucuguauccagctt

SEQ ID NO: 7769 - DNA, 21 bp, Artificial Sequence
  synthetic
  misc_feature (1)..(1): 5'-3 attached deoxy abasic moiety
  misc_feature (1)..(19): ribonucleotide
  misc_feature (21)..(21): 3'-3 attached deoxy abasic moiety
gugcagcaauggacgauuutt

SEQ ID NO: 7770 - DNA, 21 bp, Artificial Sequence
  synthetic
  misc_feature (1)..(1): 5'-3 attached deoxy abasic moiety
  misc_feature (1)..(19): ribonucleotide
  misc_feature (21)..(21): 3'-3 attached deoxy abasic moiety
ccugacacaugcauuaaaatt

SEQ ID NO: 7771 - DNA, 21 bp, Artificial Sequence
  synthetic
  misc_feature (1)..(1): 5'-3 attached deoxy abasic moiety
  misc_feature (1)..(19): ribonucleotide
  misc_feature (21)..(21): 3'-3 attached deoxy abasic moiety
cacuguuaaagcacagauutt

SEQ ID NO: 7772 - DNA, 21 bp, Artificial Sequence
  synthetic
  misc_feature (1)..(1): 5'-3 attached deoxy abasic moiety
  misc_feature (1)..(19): ribonucleotide
  misc_feature (21)..(21): 3'-3 attached deoxy abasic moiety
caaggacuaaaaacaugaatt

SEQ ID NO: 7773 - DNA, 21 bp, Artificial Sequence
  synthetic
  misc_feature (1)..(1): 5'-3 attached deoxy abasic moiety
  misc_feature (1)..(19): ribonucleotide
  misc_feature (21)..(21): 3'-3 attached deoxy abasic moiety
caccagagaaaguagacuutt

SEQ ID NO: 7774 - DNA, 21 bp, Artificial Sequence
  synthetic
  misc_feature (1)..(1): 5'-3 attached deoxy abasic moiety
  misc_feature (1)..(19): ribonucleotide
  misc_feature (21)..(21): 3'-3 attached deoxy abasic moiety
ccacauauauuaccuugaatt

SEQ ID NO: 7775 - DNA, 21 bp, Artificial Sequence
  synthetic
  misc_feature (1)..(1): 5'-3 attached deoxy abasic moiety
  misc_feature (1)..(19): ribonucleotide
  misc_feature (21)..(21): 3'-3 attached deoxy abasic moiety
caaggccuauguucuuguatt

SEQ ID NO: 7776 - DNA, 21 bp, Artificial Sequence
  synthetic
  misc_feature (1)..(1): 5'-3 attached deoxy abasic moiety
  misc_feature (1)..(19): ribonucleotide
  misc_feature (21)..(21): 3'-3 attached deoxy abasic moiety
gcuggauacagaaugaguutt

SEQ ID NO: 7777 - DNA, 21 bp, Artificial Sequence
  synthetic
  misc_feature (1)..(19): ribonucleotide
  misc_feature (20)..(21): phophorothioate linkage
aaaucguccauugcugcactt

SEQ ID NO: 7778 - DNA, 21 bp, Artificial Sequence
  synthetic
  misc_feature (1)..(19): ribonucleotide
  misc_feature (20)..(21): phophorothioate linkage
uuuuaaugcaugugucaggtt

SEQ ID NO: 7779 - DNA, 21 bp, Artificial Sequence
  synthetic
  misc_feature (1)..(19): ribonucleotide
  misc_feature (20)..(21): phophorothioate linkage
aaucugugcuuuaacagugtt

SEQ ID NO: 7780 - DNA, 21 bp, Artificial Sequence
  synthetic
  misc_feature (1)..(19): ribonucleotide
  misc_feature (20)..(21): phophorothioate linkage
uucauguuuuuaguccuugtt

SEQ ID NO: 7781 - DNA, 21 bp, Artificial Sequence
  synthetic
  misc_feature (1)..(19): ribonucleotide
  misc_feature (20)..(21): phophorothioate linkage
aagucuacuuucucuggugtt

SEQ ID NO: 7782 - DNA, 21 bp, Artificial Sequence
  synthetic
  misc_feature (1)..(19): ribonucleotide
  misc_feature (20)..(21): phophorothioate linkage
uucaagguaauauauguggtt

SEQ ID NO: 7783 - DNA, 21 bp, Artificial Sequence
  synthetic
  misc_feature (1)..(19): ribonucleotide
  misc_feature (20)..(21): phophorothioate linkage
uacaagaacauaggccuugtt

SEQ ID NO: 7784 - DNA, 21 bp, Artificial Sequence
  synthetic
  misc_feature (1)..(19): ribonucleotide
  misc_feature (20)..(21): phophorothioate linkage
aacucauucuguauccagctt

SEQ ID NO: 7785 - DNA, 21 bp, Artificial Sequence
  synthetic
  misc_feature (1)..(3): 2'-O-methyl
  misc_feature (4)..(5): 2'-deoxy-2'-fluoro
  misc_feature (6)..(6): 2'-O-methyl
  misc_feature (7)..(9): 2'-deoxy-2'-fluoro
  misc_feature (10)..(10): 2'-O-methyl
  misc_feature (11)..(12): 2'-deoxy-2'-fluoro
  misc_feature (13)..(13): 2'-O-methyl
  misc_feature (14)..(15): 2'-deoxy-2'-fluoro
  misc_feature (16)..(16): 2'-O-methyl
  misc_feature (17)..(17): 2'-deoxy-2'-fluoro
  misc_feature (18)..(18): 2'-O-methyl
  misc_feature (19)..(19): 2'-deoxy-2'-fluoro
  misc_feature (21)..(21): 3'-3 attached deoxy abasic moiety
aaaucguccauugcugcactt

SEQ ID NO: 7786 - DNA, 21 bp, Artificial Sequence
  synthetic
  misc_feature (1)..(4): 2'-deoxy-2'-fluoro
  misc_feature (5)..(6): 2'-O-methyl
  misc_feature (7)..(7): 2'-deoxy-2'-fluoro
  misc_feature (8)..(8): 2'-O-methyl
  misc_feature (9)..(9): 2'-deoxy-2'-fluoro
  misc_feature (10)..(10): 2'-O-methyl
  misc_feature (11)..(11): 2'-deoxy-2'-fluoro
  misc_feature (12)..(12): 2'-O-methyl
  misc_feature (13)..(13): 2'-deoxy-2'-fluoro
  misc_feature (14)..(14): 2'-O-methyl
  misc_feature (15)..(16): 2'-deoxy-2'-fluoro
  misc_feature (17)..(19): 2'-O-methyl
  misc_feature (21)..(21): 3'-3 attached deoxy abasic moiety
uuuuaaugcaugugucaggtt

SEQ ID NO: 7787 - DNA, 21 bp, Artificial Sequence
  synthetic
  misc_feature (1)..(2): 2'-O-methyl
  misc_feature (3)..(5): 2'-deoxy-2'-fluoro
  misc_feature (6)..(6): 2'-O-methyl
  misc_feature (7)..(7): 2'-deoxy-2'-fluoro
  misc_feature (8)..(8): 2'-O-methyl
  misc_feature (9)..(12): 2'-deoxy-2'-fluoro
  misc_feature (13)..(14): 2'-O-methyl
  misc_feature (15)..(15): 2'-deoxy-2'-fluoro
  misc_feature (16)..(17): 2'-O-methyl
  misc_feature (18)..(18): 2'-deoxy-2'-fluoro
  misc_feature (19)..(19): 2'-O-methyl
  misc_feature (21)..(21): 3'-3 attached deoxy abasic moiety
aaucugugcuuuaacagugtt

SEQ ID NO: 7788 - DNA, 21 bp, Artificial Sequence
  synthetic
  misc_feature (1)..(3): 2'-deoxy-2'-fluoro
  misc_feature (4)..(4): 2'-O-methyl
  misc_feature (5)..(5): 2'-deoxy-2'-fluoro
  misc_feature (6)..(6): 2'-O-methyl
  misc_feature (7)..(11): 2'-deoxy-2'-fluoro
  misc_feature (12)..(13): 2'-O-methyl
  misc_feature (14)..(18): 2'-deoxy-2'-fluoro
  misc_feature (19)..(19): 2'-O-methyl
  misc_feature (21)..(21): 3'-3 attached deoxy abasic moiety
uucauguuuuuaguccuugtt

SEQ ID NO: 7789 - DNA, 21 bp, Artificial Sequence
  synthetic
  misc_feature (1)..(3): 2'-O-methyl
  misc_feature (4)..(6): 2'-deoxy-2'-fluoro
  misc_feature (7)..(7): 2'-O-methyl
  misc_feature (8)..(15): 2'-deoxy-2'-fluoro
  misc_feature (16)..(17): 2'-O-methyl
  misc_feature (18)..(18): 2'-deoxy-2'-fluoro
  misc_feature (19)..(19): 2'-O-methyl
  misc_feature (21)..(21): 3'-3 attached deoxy abasic moiety
aagucuacuuucucuggugtt

SEQ ID NO: 7790 - DNA, 21 bp, Artificial Sequence
  synthetic
  misc_feature (1)..(3): 2'-deoxy-2'-fluoro
  misc_feature (4)..(7): 2'-O-methyl
  misc_feature (8)..(8): 2'-deoxy-2'-fluoro
  misc_feature (9)..(10): 2'-O-methyl
  misc_feature (11)..(11): 2'-deoxy-2'-fluoro
  misc_feature (12)..(12): 2'-O-methyl
  misc_feature (13)..(13): 2'-deoxy-2'-fluoro
  misc_feature (14)..(14): 2'-O-methyl
  misc_feature (15)..(15): 2'-deoxy-2'-fluoro
  misc_feature (16)..(16): 2'-O-methyl
  misc_feature (17)..(17): 2'-deoxy-2'-fluoro
  misc_feature (18)..(19): 2'-O-methyl
  misc_feature (21)..(21): 3'-3 attached deoxy abasic moiety
uucaagguaauauauguggtt

SEQ ID NO: 7791 - DNA, 21 bp, Artificial Sequence
  synthetic
  misc_feature (1)..(1): 2'-deoxy-2'-fluoro
  misc_feature (2)..(2): 2'-O-methyl
  misc_feature (3)..(3): 2'-deoxy-2'-fluoro
  misc_feature (4)..(8): 2'-O-methyl
  misc_feature (9)..(9): 2'-deoxy-2'-fluoro
  misc_feature (10)..(10): 2'-O-methyl
  misc_feature (11)..(11): 2'-deoxy-2'-fluoro
  misc_feature (12)..(14): 2'-O-methyl
  misc_feature (15)..(18): 2'-deoxy-2'-fluoro
  misc_feature (19)..(19): 2'-O-methyl
  misc_feature (21)..(21): 3'-3 attached deoxy abasic moiety
uacaagaacauaggccuugtt

SEQ ID NO: 7792 - DNA, 21 bp, Artificial Sequence
  synthetic
  misc_feature (1)..(2): 2'-O-methyl
  misc_feature (3)..(5): 2'-deoxy-2'-fluoro
  misc_feature (6)..(6): 2'-O-methyl
  misc_feature (7)..(10): 2'-deoxy-2'-fluoro
  misc_feature (11)..(11): 2'-O-methyl
  misc_feature (12)..(12): 2'-deoxy-2'-fluoro
  misc_feature (13)..(13): 2'-O-methyl
  misc_feature (14)..(16): 2'-deoxy-2'-fluoro
  misc_feature (17)..(18): 2'-O-methyl
  misc_feature (19)..(19): 2'-deoxy-2'-fluoro
  misc_feature (21)..(21): 3'-3 attached deoxy abasic moiety
aacucauucuguauccagctt

SEQ ID NO: 7793 - DNA, 21 bp, Artificial Sequence
  synthetic
  misc_feature (1)..(19): ribonucleotide
  misc_feature (21)..(21): 3'-3 attached deoxy abasic moiety
aaaucguccauugcugcactt

SEQ ID NO: 7794 - DNA, 21 bp, Artificial Sequence
  synthetic
  misc_feature (1)..(19): ribonucleotide
  misc_feature (21)..(21): 3'-3 attached deoxy abasic moiety
uuuuaaugcaugugucaggtt

SEQ ID NO: 7795 - DNA, 21 bp, Artificial Sequence
  synthetic
  misc_feature (1)..(19): ribonucleotide
  misc_feature (21)..(21): 3'-3 attached deoxy abasic moiety
aaucugugcuuuaacagugtt

SEQ ID NO: 7796 - DNA, 21 bp, Artificial Sequence
  synthetic
  misc_feature (1)..(19): ribonucleotide
  misc_feature (21)..(21): 3'-3 attached deoxy abasic moiety
uucauguuuuuaguccuugtt

SEQ ID NO: 7797 - DNA, 21 bp, Artificial Sequence
  synthetic
  misc_feature (1)..(19): ribonucleotide
  misc_feature (21)..(21): 3'-3 attached deoxy abasic moiety
aagucuacuuucucuggugtt

SEQ ID NO: 7798 - DNA, 21 bp, Artificial Sequence
  synthetic
  misc_feature (1)..(19): ribonucleotide
  misc_feature (21)..(21): 3'-3 attached deoxy abasic moiety
uucaagguaauauauguggtt

SEQ ID NO: 7799 - DNA, 21 bp, Artificial Sequence
  synthetic
  misc_feature (1)..(19): ribonucleotide
  misc_feature (21)..(21): 3'-3 attached deoxy abasic moiety
uacaagaacauaggccuugtt

SEQ ID NO: 7800 - DNA, 21 bp, Artificial Sequence
  synthetic
  misc_feature (1)..(19): ribonucleotide
  misc_feature (21)..(21): 3'-3 attached deoxy abasic moiety
aacucauucuguauccagctt

SEQ ID NO: 7801 - DNA, 21 bp, Artificial Sequence
  synthetic
  misc_feature (1)..(3): ribonucleotide
  misc_feature (4)..(5): 2'-deoxy-2'-fluoro
  misc_feature (6)..(6): 2'-O-methyl
  misc_feature (7)..(9): 2'-deoxy-2'-fluoro
  misc_feature (10)..(10): 2'-O-methyl
  misc_feature (11)..(12): 2'-deoxy-2'-fluoro
  misc_feature (13)..(13): 2'-O-methyl
  misc_feature (14)..(15): 2'-deoxy-2'-fluoro
  misc_feature (16)..(16): 2'-O-methyl
  misc_feature (17)..(17): 2'-deoxy-2'-fluoro
  misc_feature (18)..(18): 2'-O-methyl
  misc_feature (19)..(19): 2'-deoxy-2'-fluoro
  misc_feature (20)..(21): phosphorothioate linkage
aaaucguccauugcugcactt

SEQ ID NO: 7802 - DNA, 21 bp, Artificial Sequence
  synthetic
  misc_feature (1)..(3): ribonucleotide
  misc_feature (4)..(4): 2'-deoxy-2'-fluoro
  misc_feature (5)..(6): 2'-O-methyl
  misc_feature (7)..(7): 2'-deoxy-2'-fluoro
  misc_feature (8)..(8): 2'-O-methyl
  misc_feature (9)..(9): 2'-deoxy-2'-fluoro
  misc_feature (10)..(10): 2'-O-methyl
  misc_feature (11)..(11): 2'-deoxy-2'-fluoro
  misc_feature (12)..(12): 2'-O-methyl
  misc_feature (13)..(13): 2'-deoxy-2'-fluoro
  misc_feature (14)..(14): 2'-O-methyl
  misc_feature (15)..(16): 2'-deoxy-2'-fluoro
  misc_feature (17)..(19): 2'-O-methyl
  misc_feature (20)..(21): phosphorothioate linkage
uuuuaaugcaugugucaggtt

SEQ ID NO: 7803 - DNA, 21 bp, Artificial Sequence
  synthetic
  misc_feature (1)..(3): ribonucleotide
  misc_feature (4)..(5): 2'-deoxy-2'-fluoro
  misc_feature (6)..(6): 2'-O-methyl
  misc_feature (7)..(7): 2'-deoxy-2'-fluoro
  misc_feature (8)..(8): 2'-O-methyl
  misc_feature (9)..(12): 2'-deoxy-2'-fluoro
  misc_feature (13)..(14): 2'-O-methyl
  misc_feature (15)..(15): 2'-deoxy-2'-fluoro
  misc_feature (16)..(17): 2'-O-methyl
  misc_feature (18)..(18): 2'-deoxy-2'-fluoro
  misc_feature (19)..(19): 2'-O-methyl
  misc_feature (20)..(21): phosphorothioate linkage
aaucugugcuuuaacagugtt

SEQ ID NO: 7804 - DNA, 21 bp, Artificial Sequence
  synthetic
  misc_feature (1)..(3): ribonucleotide
  misc_feature (4)..(4): 2'-O-methyl
  misc_feature (5)..(5): 2'-deoxy-2'-fluoro
  misc_feature (6)..(6): 2'-O-methyl
  misc_feature (7)..(11): 2'-deoxy-2'-fluoro
  misc_feature (12)..(13): 2'-O-methyl
  misc_feature (14)..(18): 2'-deoxy-2'-fluoro
  misc_feature (19)..(19): 2'-O-methyl
  misc_feature (20)..(21): phosphorothioate linkage
uucauguuuuuaguccuugtt

SEQ ID NO: 7805 - DNA, 21 bp, Artificial Sequence
  synthetic
  misc_feature (1)..(3): ribonucleotide
  misc_feature (4)..(6): 2'-deoxy-2'-fluoro
  misc_feature (7)..(7): 2'-O-methyl
  misc_feature (8)..(15): 2'-deoxy-2'-fluoro
  misc_feature (16)..(17): 2'-O-methyl
  misc_feature (18)..(18): 2'-deoxy-2'-fluoro
  misc_feature (19)..(19): 2'-O-methyl
  misc_feature (20)..(21): phosphorothioate linkage
aagucuacuuucucuggugtt

SEQ ID NO: 7806 - DNA, 21 bp, Artificial Sequence
  synthetic
  misc_feature (1)..(3): ribonucleotide
  misc_feature (4)..(7): 2'-O-methyl
  misc_feature (8)..(8): 2'-deoxy-2'-fluoro
  misc_feature (9)..(10): 2'-O-methyl
  misc_feature (11)..(11): 2'-deoxy-2'-fluoro
  misc_feature (12)..(12): 2'-O-methyl
  misc_feature (13)..(13): 2'-deoxy-2'-fluoro
  misc_feature (14)..(14): 2'-O-methyl
  misc_feature (15)..(15): 2'-deoxy-2'-fluoro
  misc_feature (16)..(16): 2'-O-methyl
  misc_feature (17)..(17): 2'-deoxy-2'-fluoro
  misc_feature (18)..(19): 2'-O-methyl
  misc_feature (20)..(21): phosphorothioate linkage
uucaagguaauauauguggtt

SEQ ID NO: 7807 - DNA, 21 bp, Artificial Sequence
  synthetic
  misc_feature (1)..(8): 2'-O-methyl
  misc_feature (9)..(9): 2'-deoxy-2'-fluoro
  misc_feature (10)..(10): 2'-O-methyl
  misc_feature (11)..(11): 2'-deoxy-2'-fluoro
  misc_feature (12)..(14): 2'-O-methyl
  misc_feature (15)..(18): 2'-deoxy-2'-fluoro
  misc_feature (19)..(19): 2'-O-methyl
  misc_feature (20)..(21): phosphorothioate linkage
uacaagaacauaggccuugtt

SEQ ID NO: 7808 - DNA, 21 bp, Artificial Sequence
  synthetic
  misc_feature (1)..(3): ribonucleotide
  misc_feature (4)..(5): 2'-deoxy-2'-fluoro
  misc_feature (6)..(6): 2'-O-methyl
  misc_feature (7)..(10): 2'-deoxy-2'-fluoro
  misc_feature (11)..(11): 2'-O-methyl
  misc_feature (12)..(12): 2'-deoxy-2'-fluoro
  misc_feature (13)..(13): 2'-O-methyl
  misc_feature (14)..(16): 2'-deoxy-2'-fluoro
  misc_feature (17)..(18): 2'-O-methyl
  misc_feature (19)..(19): 2'-deoxy-2'-fluoro
  misc_feature (20)..(21): phosphorothioate linkage
aacucauucuguauccagctt

SEQ ID NO: 7809 - RNA, 19 nt, Artificial Sequence
  synthetic
caaaagcagguagauauug

SEQ ID NO: 7810 - RNA, 19 nt, Artificial Sequence
  synthetic
aaaagcagguagauauuga

SEQ ID NO: 7811 - RNA, 19 nt, Artificial Sequence
  synthetic
aaagcagguagauauugaa

SEQ ID NO: 7812 - RNA, 19 nt, Artificial Sequence
  synthetic
aagcagguagauauugaaa

SEQ ID NO: 7813 - RNA, 19 nt, Artificial Sequence
  synthetic
agcagguagauauugaaag

SEQ ID NO: 7814 - RNA, 19 nt, Artificial Sequence
  synthetic
gcagguagauauugaaaga

SEQ ID NO: 7815 - RNA, 19 nt, Artificial Sequence
  synthetic
cagguagauauugaaagau

SEQ ID NO: 7816 - RNA, 19 nt, Artificial Sequence
  synthetic
agguagauauugaaagaug

SEQ ID NO: 7817 - RNA, 19 nt, Artificial Sequence
  synthetic
gguagauauugaaagauga

SEQ ID NO: 7818 - RNA, 19 nt, Artificial Sequence
  synthetic
guagauauugaaagaugag

SEQ ID NO: 7819 - RNA, 19 nt, Artificial Sequence
  synthetic
uagauauugaaagaugagc

SEQ ID NO: 7820 - RNA, 19 nt, Artificial Sequence
  synthetic
agauauugaaagaugagcc

SEQ ID NO: 7821 - RNA, 19 nt, Artificial Sequence
  synthetic
gauauugaaagaugagccu

SEQ ID NO: 7822 - RNA, 19 nt, Artificial Sequence
  synthetic
auauugaaagaugagccuu

SEQ ID NO: 7823 - RNA, 19 nt, Artificial Sequence
  synthetic
uauugaaagaugagccuuc

SEQ ID NO: 7824 - RNA, 19 nt, Artificial Sequence
  synthetic
auugaaagaugagccuucu

SEQ ID NO: 7825 - RNA, 19 nt, Artificial Sequence
  synthetic
uugaaagaugagccuucua

SEQ ID NO: 7826 - RNA, 19 nt, Artificial Sequence
  synthetic
ugaaagaugagccuucuaa

SEQ ID NO: 7827 - RNA, 19 nt, Artificial Sequence
  synthetic
gaaagaugagccuucuaac

SEQ ID NO: 7828 - RNA, 19 nt, Artificial Sequence
  synthetic
ccgaggucgaaacguaugu

SEQ ID NO: 7829 - RNA, 19 nt, Artificial Sequence
  synthetic
gaggucgaaacguauguuc

SEQ ID NO: 7830 - RNA, 19 nt, Artificial Sequence
  synthetic
aggucgaaacguauguucu

SEQ ID NO: 7831 - RNA, 19 nt, Artificial Sequence
  synthetic
ggucgaaacguauguucuc

SEQ ID NO: 7832 - RNA, 19 nt, Artificial Sequence
  synthetic
gucgaaacguauguucucu

SEQ ID NO: 7833 - RNA, 19 nt, Artificial Sequence
  synthetic
ucgaaacguauguucucuc

SEQ ID NO: 7834 - RNA, 19 nt, Artificial Sequence
  synthetic
cgaaacguauguucucucu

SEQ ID NO: 7835 - RNA, 19 nt, Artificial Sequence
  synthetic
gaaacguauguucucucua

SEQ ID NO: 7836 - RNA, 19 nt, Artificial Sequence
  synthetic
aaacguauguucucucuau

SEQ ID NO: 7837 - RNA, 19 nt, Artificial Sequence
  synthetic
aacguauguucucucuauc

SEQ ID NO: 7838 - RNA, 19 nt, Artificial Sequence
  synthetic
acguauguucucucuaucg

SEQ ID NO: 7839 - RNA, 19 nt, Artificial Sequence
  synthetic
cguauguucucucuaucgu

SEQ ID NO: 7840 - RNA, 19 nt, Artificial Sequence
  synthetic
guauguucucucuaucguu

SEQ ID NO: 7841 - RNA, 19 nt, Artificial Sequence
  synthetic
uauguucucucuaucguuc

SEQ ID NO: 7842 - RNA, 19 nt, Artificial Sequence
  synthetic
auguucucucuaucguucc

SEQ ID NO: 7843 - RNA, 19 nt, Artificial Sequence
  synthetic
uguucucucuaucguucca

SEQ ID NO: 7844 - RNA, 19 nt, Artificial Sequence
  synthetic
guucucucuaucguuccau

SEQ ID NO: 7845 - RNA, 19 nt, Artificial Sequence
  synthetic
uucucucuaucguuccauc

SEQ ID NO: 7846 - RNA, 19 nt, Artificial Sequence
  synthetic
ucucucuaucguuccauca

SEQ ID NO: 7847 - RNA, 19 nt, Artificial Sequence
  synthetic
cucucuaucguuccaucag

SEQ ID NO: 7848 - RNA, 19 nt, Artificial Sequence
  synthetic
ucucuaucguuccaucagg

SEQ ID NO: 7849 - RNA, 19 nt, Artificial Sequence
  synthetic
cucuaucguuccaucaggc

SEQ ID NO: 7850 - RNA, 19 nt, Artificial Sequence
  synthetic
ucuaucguuccaucaggcc

SEQ ID NO: 7851 - RNA, 19 nt, Artificial Sequence
  synthetic
cuaucguuccaucaggccc

SEQ ID NO: 7852 - RNA, 19 nt, Artificial Sequence
  synthetic
uaucguuccaucaggcccc

SEQ ID NO: 7853 - RNA, 19 nt, Artificial Sequence
  synthetic
aucguuccaucaggccccc

SEQ ID NO: 7854 - RNA, 19 nt, Artificial Sequence
  synthetic
ucguuccaucaggcccccu

SEQ ID NO: 7855 - RNA, 19 nt, Artificial Sequence
  synthetic
cguuccaucaggcccccuc

SEQ ID NO: 7856 - RNA, 19 nt, Artificial Sequence
  synthetic
guuccaucaggcccccuca

SEQ ID NO: 7857 - RNA, 19 nt, Artificial Sequence
  synthetic
uuccaucaggcccccucaa

SEQ ID NO: 7858 - RNA, 19 nt, Artificial Sequence
  synthetic
uccaucaggcccccucaaa

SEQ ID NO: 7859 - RNA, 19 nt, Artificial Sequence
  synthetic
ccaucaggcccccucaaag

SEQ ID NO: 7860 - RNA, 19 nt, Artificial Sequence
  synthetic
caucaggcccccucaaagc

SEQ ID NO: 7861 - RNA, 19 nt, Artificial Sequence
  synthetic
aucaggcccccucaaagcc

SEQ ID NO: 7862 - RNA, 19 nt, Artificial Sequence
  synthetic
ucaggcccccucaaagccg

SEQ ID NO: 7863 - RNA, 19 nt, Artificial Sequence
  synthetic
caggcccccucaaagccga

SEQ ID NO: 7864 - RNA, 19 nt, Artificial Sequence
  synthetic
aaaucgcgcagagacuuga

SEQ ID NO: 7865 - RNA, 19 nt, Artificial Sequence
  synthetic
aucgcgcagagacuugaag

SEQ ID NO: 7866 - RNA, 19 nt, Artificial Sequence
  synthetic
ucgcgcagagacuugaaga

SEQ ID NO: 7867 - RNA, 19 nt, Artificial Sequence
  synthetic
cgcgcagagacuugaagau

SEQ ID NO: 7868 - RNA, 19 nt, Artificial Sequence
  synthetic
gcgcagagacuugaagaug

SEQ ID NO: 7869 - RNA, 19 nt, Artificial Sequence
  synthetic
cgcagagacuugaagaugu

SEQ ID NO: 7870 - RNA, 19 nt, Artificial Sequence
  synthetic
gcagagacuugaagauguc

SEQ ID NO: 7871 - RNA, 19 nt, Artificial Sequence
  synthetic
cagagacuugaagaugucu

SEQ ID NO: 7872 - RNA, 19 nt, Artificial Sequence
  synthetic
agagacuugaagaugucuu

SEQ ID NO: 7873 - RNA, 19 nt, Artificial Sequence
  synthetic
gagacuugaagaugucuuu

SEQ ID NO: 7874 - RNA, 19 nt, Artificial Sequence
  synthetic
agacuugaagaugucuuug

SEQ ID NO: 7875 - RNA, 19 nt, Artificial Sequence
  synthetic
gacuugaagaugucuuugc

SEQ ID NO: 7876 - RNA, 19 nt, Artificial Sequence
  synthetic
acuugaagaugucuuugcu

SEQ ID NO: 7877 - RNA, 19 nt, Artificial Sequence
  synthetic
cuugaagaugucuuugcug

SEQ ID NO: 7878 - RNA, 19 nt, Artificial Sequence
  synthetic
uugaagaugucuuugcugg

SEQ ID NO: 7879 - RNA, 19 nt, Artificial Sequence
  synthetic
ugaagaugucuuugcuggg

SEQ ID NO: 7880 - RNA, 19 nt, Artificial Sequence
  synthetic
gaagaugucuuugcuggga

SEQ ID NO: 7881 - RNA, 19 nt, Artificial Sequence
  synthetic
aagaugucuuugcugggaa

SEQ ID NO: 7882 - RNA, 19 nt, Artificial Sequence
  synthetic
agaugucuuugcugggaaa

SEQ ID NO: 7883 - RNA, 19 nt, Artificial Sequence
  synthetic
gaugucuuugcugggaaaa

SEQ ID NO: 7884 - RNA, 19 nt, Artificial Sequence
  synthetic
augucuuugcugggaaaaa

SEQ ID NO: 7885 - RNA, 19 nt, Artificial Sequence
  synthetic
ugucuuugcugggaaaaac

SEQ ID NO: 7886 - RNA, 19 nt, Artificial Sequence
  synthetic
gucuuugcugggaaaaaca

SEQ ID NO: 7887 - RNA, 19 nt, Artificial Sequence
  synthetic
ucuuugcugggaaaaacac

SEQ ID NO: 7888 - RNA, 19 nt, Artificial Sequence
  synthetic
cuuugcugggaaaaacaca

SEQ ID NO: 7889 - RNA, 19 nt, Artificial Sequence
  synthetic
uuugcugggaaaaacacag

SEQ ID NO: 7890 - RNA, 19 nt, Artificial Sequence
  synthetic
uugcugggaaaaacacaga

SEQ ID NO: 7891 - RNA, 19 nt, Artificial Sequence
  synthetic
ugcugggaaaaacacagau

SEQ ID NO: 7892 - RNA, 19 nt, Artificial Sequence
  synthetic
gcugggaaaaacacagauc

SEQ ID NO: 7893 - RNA, 19 nt, Artificial Sequence
  synthetic
cugggaaaaacacagaucu

SEQ ID NO: 7894 - RNA, 19 nt, Artificial Sequence
  synthetic
ugggaaaaacacagaucuu

SEQ ID NO: 7895 - RNA, 19 nt, Artificial Sequence
  synthetic
gggaaaaacacagaucuug

SEQ ID NO: 7896 - RNA, 19 nt, Artificial Sequence
  synthetic
ggaaaaacacagaucuuga

SEQ ID NO: 7897 - RNA, 19 nt, Artificial Sequence
  synthetic
gaaaaacacagaucuugag

SEQ ID NO: 7898 - RNA, 19 nt, Artificial Sequence
  synthetic
aaaaacacagaucuugagg

SEQ ID NO: 7899 - RNA, 19 nt, Artificial Sequence
  synthetic
aaaacacagaucuugaggc

SEQ ID NO: 7900 - RNA, 19 nt, Artificial Sequence
  synthetic
aaacacagaucuugaggcu

SEQ ID NO: 7901 - RNA, 19 nt, Artificial Sequence
  synthetic
aacacagaucuugaggcuc

SEQ ID NO: 7902 - RNA, 19 nt, Artificial Sequence
  synthetic
acacagaucuugaggcucu

SEQ ID NO: 7903 - RNA, 19 nt, Artificial Sequence
  synthetic
cacagaucuugaggcucuc

SEQ ID NO: 7904 - RNA, 19 nt, Artificial Sequence
  synthetic
acagaucuugaggcucuca

SEQ ID NO: 7905 - RNA, 19 nt, Artificial Sequence
  synthetic
cagaucuugaggcucucau

SEQ ID NO: 7906 - RNA, 19 nt, Artificial Sequence
  synthetic
agaucuugaggcucucaug

SEQ ID NO: 7907 - RNA, 19 nt, Artificial Sequence
  synthetic
gaucuugaggcucucaugg

SEQ ID NO: 7908 - RNA, 19 nt, Artificial Sequence
  synthetic
aucuugaggcucucaugga

SEQ ID NO: 7909 - RNA, 19 nt, Artificial Sequence
  synthetic
ucuugaggcucucauggaa

SEQ ID NO: 7910 - RNA, 19 nt, Artificial Sequence
  synthetic
cuugaggcucucauggaau

SEQ ID NO: 7911 - RNA, 19 nt, Artificial Sequence
  synthetic
uugaggcucucauggaaug

SEQ ID NO: 7912 - RNA, 19 nt, Artificial Sequence
  synthetic
ugaggcucucauggaaugg

SEQ ID NO: 7913 - RNA, 19 nt, Artificial Sequence
  synthetic
gaggcucucauggaauggc

SEQ ID NO: 7914 - RNA, 19 nt, Artificial Sequence
  synthetic
aggcucucauggaauggcu

SEQ ID NO: 7915 - RNA, 19 nt, Artificial Sequence
  synthetic
ggcucucauggaauggcua

SEQ ID NO: 7916 - RNA, 19 nt, Artificial Sequence
  synthetic
gcucucauggaauggcuaa

SEQ ID NO: 7917 - RNA, 19 nt, Artificial Sequence
  synthetic
cucucauggaauggcuaaa

SEQ ID NO: 7918 - RNA, 19 nt, Artificial Sequence
  synthetic
ucucauggaauggcuaaag

SEQ ID NO: 7919 - RNA, 19 nt, Artificial Sequence
  synthetic
cucauggaauggcuaaaga

SEQ ID NO: 7920 - RNA, 19 nt, Artificial Sequence
  synthetic
ucauggaauggcuaaagac

SEQ ID NO: 7921 - RNA, 19 nt, Artificial Sequence
  synthetic
cauggaauggcuaaagaca

SEQ ID NO: 7922 - RNA, 19 nt, Artificial Sequence
  synthetic
auggaauggcuaaagacaa

SEQ ID NO: 7923 - RNA, 19 nt, Artificial Sequence
  synthetic
uggaauggcuaaagacaag

SEQ ID NO: 7924 - RNA, 19 nt, Artificial Sequence
  synthetic
ggaauggcuaaagacaaga

SEQ ID NO: 7925 - RNA, 19 nt, Artificial Sequence
  synthetic
gaauggcuaaagacaagac

SEQ ID NO: 7926 - RNA, 19 nt, Artificial Sequence
  synthetic
aauggcuaaagacaagacc

SEQ ID NO: 7927 - RNA, 19 nt, Artificial Sequence
  synthetic
auggcuaaagacaagacca

SEQ ID NO: 7928 - RNA, 19 nt, Artificial Sequence
  synthetic
uggcuaaagacaagaccaa

SEQ ID NO: 7929 - RNA, 19 nt, Artificial Sequence
  synthetic
ggcuaaagacaagaccaau

SEQ ID NO: 7930 - RNA, 19 nt, Artificial Sequence
  synthetic
agacaagaccaauccuguc

SEQ ID NO: 7931 - RNA, 19 nt, Artificial Sequence
  synthetic
cugucaccucugacuaagg

SEQ ID NO: 7932 - RNA, 19 nt, Artificial Sequence
  synthetic
ugucaccucugacuaaggg

SEQ ID NO: 7933 - RNA, 19 nt, Artificial Sequence
  synthetic
gucaccucugacuaagggg

SEQ ID NO: 7934 - RNA, 19 nt, Artificial Sequence
  synthetic
ucaccucugacuaagggga

SEQ ID NO: 7935 - RNA, 19 nt, Artificial Sequence
  synthetic
caccucugacuaaggggau

SEQ ID NO: 7936 - RNA, 19 nt, Artificial Sequence
  synthetic
accucugacuaaggggauu

SEQ ID NO: 7937 - RNA, 19 nt, Artificial Sequence
  synthetic
ccucugacuaaggggauuu

SEQ ID NO: 7938 - RNA, 19 nt, Artificial Sequence
  synthetic
cucugacuaaggggauuuu

SEQ ID NO: 7939 - RNA, 19 nt, Artificial Sequence
  synthetic
ucugacuaaggggauuuug

SEQ ID NO: 7940 - RNA, 19 nt, Artificial Sequence
  synthetic
cugacuaaggggauuuugg

SEQ ID NO: 7941 - RNA, 19 nt, Artificial Sequence
  synthetic
ugacuaaggggauuuuggg

SEQ ID NO: 7942 - RNA, 19 nt, Artificial Sequence
  synthetic
gacuaaggggauuuugggg

SEQ ID NO: 7943 - RNA, 19 nt, Artificial Sequence
  synthetic
acuaaggggauuuuggggu

SEQ ID NO: 7944 - RNA, 19 nt, Artificial Sequence
  synthetic
cuaaggggauuuugggguu

SEQ ID NO: 7945 - RNA, 19 nt, Artificial Sequence
  synthetic
uaaggggauuuugggguuu

SEQ ID NO: 7946 - RNA, 19 nt, Artificial Sequence
  synthetic
aaggggauuuugggguuug

SEQ ID NO: 7947 - RNA, 19 nt, Artificial Sequence
  synthetic
aggggauuuugggguuugu

SEQ ID NO: 7948 - RNA, 19 nt, Artificial Sequence
  synthetic
ggggauuuugggguuugug

SEQ ID NO: 7949 - RNA, 19 nt, Artificial Sequence
  synthetic
gggauuuugggguuugugu

SEQ ID NO: 7950 - RNA, 19 nt, Artificial Sequence
  synthetic
ggauuuugggguuuguguu

SEQ ID NO: 7951 - RNA, 19 nt, Artificial Sequence
  synthetic
gauuuugggguuuguguuc

SEQ ID NO: 7952 - RNA, 19 nt, Artificial Sequence
  synthetic
auuuugggguuuguguuca

SEQ ID NO: 7953 - RNA, 19 nt, Artificial Sequence
  synthetic
uuuugggguuuguguucac

SEQ ID NO: 7954 - RNA, 19 nt, Artificial Sequence
  synthetic
uuugggguuuguguucacg

SEQ ID NO: 7955 - RNA, 19 nt, Artificial Sequence
  synthetic
uugggguuuguguucacgc

SEQ ID NO: 7956 - RNA, 19 nt, Artificial Sequence
  synthetic
ugggguuuguguucacgcu

SEQ ID NO: 7957 - RNA, 19 nt, Artificial Sequence
  synthetic
gggguuuguguucacgcuc

SEQ ID NO: 7958 - RNA, 19 nt, Artificial Sequence
  synthetic
ggguuuguguucacgcuca

SEQ ID NO: 7959 - RNA, 19 nt, Artificial Sequence
  synthetic
gguuuguguucacgcucac

SEQ ID NO: 7960 - RNA, 19 nt, Artificial Sequence
  synthetic
guuuguguucacgcucacc

SEQ ID NO: 7961 - RNA, 19 nt, Artificial Sequence
  synthetic
uuuguguucacgcucaccg

SEQ ID NO: 7962 - RNA, 19 nt, Artificial Sequence
  synthetic
uuguguucacgcucaccgu

SEQ ID NO: 7963 - RNA, 19 nt, Artificial Sequence
  synthetic
uguguucacgcucaccgug

SEQ ID NO: 7964 - RNA, 19 nt, Artificial Sequence
  synthetic
guguucacgcucaccgugc

SEQ ID NO: 7965 - RNA, 19 nt, Artificial Sequence
  synthetic
uguucacgcucaccgugcc

SEQ ID NO: 7966 - RNA, 19 nt, Artificial Sequence
  synthetic
guucacgcucaccgugccc

SEQ ID NO: 7967 - RNA, 19 nt, Artificial Sequence
  synthetic
uucacgcucaccgugccca

SEQ ID NO: 7968 - RNA, 19 nt, Artificial Sequence
  synthetic
ucacgcucaccgugcccag

SEQ ID NO: 7969 - RNA, 19 nt, Artificial Sequence
  synthetic
cacgcucaccgugcccagu

SEQ ID NO: 7970 - RNA, 19 nt, Artificial Sequence
  synthetic
acgcucaccgugcccagug

SEQ ID NO: 7971 - RNA, 19 nt, Artificial Sequence
  synthetic
cgcucaccgugcccaguga

SEQ ID NO: 7972 - RNA, 19 nt, Artificial Sequence
  synthetic
gcucaccgugcccagugag

SEQ ID NO: 7973 - RNA, 19 nt, Artificial Sequence
  synthetic
cucaccgugcccagugagc

SEQ ID NO: 7974 - RNA, 19 nt, Artificial Sequence
  synthetic
ucaccgugcccagugagcg

SEQ ID NO: 7975 - RNA, 19 nt, Artificial Sequence
  synthetic
agcgaggacugcagcguag

SEQ ID NO: 7976 - RNA, 19 nt, Artificial Sequence
  synthetic
ggacugcagcguagacgcu

SEQ ID NO: 7977 - RNA, 19 nt, Artificial Sequence
  synthetic
gacugcagcguagacgcuu

SEQ ID NO: 7978 - RNA, 19 nt, Artificial Sequence
  synthetic
acugcagcguagacgcuuu

SEQ ID NO: 7979 - RNA, 19 nt, Artificial Sequence
  synthetic
cugcagcguagacgcuuug

SEQ ID NO: 7980 - RNA, 19 nt, Artificial Sequence
  synthetic
ugcagcguagacgcuuugu

SEQ ID NO: 7981 - RNA, 19 nt, Artificial Sequence
  synthetic
gcagcguagacgcuuuguc

SEQ ID NO: 7982 - RNA, 19 nt, Artificial Sequence
  synthetic
cagcguagacgcuuugucc

SEQ ID NO: 7983 - RNA, 19 nt, Artificial Sequence
  synthetic
agcguagacgcuuugucca

SEQ ID NO: 7984 - RNA, 19 nt, Artificial Sequence
  synthetic
gcguagacgcuuuguccaa

SEQ ID NO: 7985 - RNA, 19 nt, Artificial Sequence
  synthetic
cguagacgcuuuguccaaa

SEQ ID NO: 7986 - RNA, 19 nt, Artificial Sequence
  synthetic
guagacgcuuuguccaaaa

SEQ ID NO: 7987 - RNA, 19 nt, Artificial Sequence
  synthetic
uagacgcuuuguccaaaau

SEQ ID NO: 7988 - RNA, 19 nt, Artificial Sequence
  synthetic
agacgcuuuguccaaaaug

SEQ ID NO: 7989 - RNA, 19 nt, Artificial Sequence
  synthetic
gacgcuuuguccaaaaugc

SEQ ID NO: 7990 - RNA, 19 nt, Artificial Sequence
  synthetic
acgcuuuguccaaaaugcc

SEQ ID NO: 7991 - RNA, 19 nt, Artificial Sequence
  synthetic
cgcuuuguccaaaaugccc

SEQ ID NO: 7992 - RNA, 19 nt, Artificial Sequence
  synthetic
gcuuuguccaaaaugcccu

SEQ ID NO: 7993 - RNA, 19 nt, Artificial Sequence
  synthetic
cuuuguccaaaaugcccuc

SEQ ID NO: 7994 - RNA, 19 nt, Artificial Sequence
  synthetic
uuuguccaaaaugcccuca

SEQ ID NO: 7995 - RNA, 19 nt, Artificial Sequence
  synthetic
uuguccaaaaugcccucaa

SEQ ID NO: 7996 - RNA, 19 nt, Artificial Sequence
  synthetic
uguccaaaaugcccucaau

SEQ ID NO: 7997 - RNA, 19 nt, Artificial Sequence
  synthetic
guccaaaaugcccucaaug

SEQ ID NO: 7998 - RNA, 19 nt, Artificial Sequence
  synthetic
uccaaaaugcccucaaugg

SEQ ID NO: 7999 - RNA, 19 nt, Artificial Sequence
  synthetic
ccaaaaugcccucaauggg

SEQ ID NO: 8000 - RNA, 19 nt, Artificial Sequence
  synthetic
caaaaugcccucaauggga

SEQ ID NO: 8001 - RNA, 19 nt, Artificial Sequence
  synthetic
aaaaugcccucaaugggaa

SEQ ID NO: 8002 - RNA, 19 nt, Artificial Sequence
  synthetic
aaaugcccucaaugggaau

SEQ ID NO: 8003 - RNA, 19 nt, Artificial Sequence
  synthetic
aaugcccucaaugggaaug

SEQ ID NO: 8004 - RNA, 19 nt, Artificial Sequence
  synthetic
augcccucaaugggaaugg

SEQ ID NO: 8005 - RNA, 19 nt, Artificial Sequence
  synthetic
cccucaaugggaaugggga

SEQ ID NO: 8006 - RNA, 19 nt, Artificial Sequence
  synthetic
gauccaaauaacauggaca

SEQ ID NO: 8007 - RNA, 19 nt, Artificial Sequence
  synthetic
auccaaauaacauggacaa

SEQ ID NO: 8008 - RNA, 19 nt, Artificial Sequence
  synthetic
uccaaauaacauggacaaa

SEQ ID NO: 8009 - RNA, 19 nt, Artificial Sequence
  synthetic
ccaaauaacauggacaaag

SEQ ID NO: 8010 - RNA, 19 nt, Artificial Sequence
  synthetic
caaauaacauggacaaagc

SEQ ID NO: 8011 - RNA, 19 nt, Artificial Sequence
  synthetic
aaauaacauggacaaagca

SEQ ID NO: 8012 - RNA, 19 nt, Artificial Sequence
  synthetic
aauaacauggacaaagcag

SEQ ID NO: 8013 - RNA, 19 nt, Artificial Sequence
  synthetic
auaacauggacaaagcagu

SEQ ID NO: 8014 - RNA, 19 nt, Artificial Sequence
  synthetic
uaacauggacaaagcaguu

SEQ ID NO: 8015 - RNA, 19 nt, Artificial Sequence
  synthetic
aacauggacaaagcaguua

SEQ ID NO: 8016 - RNA, 19 nt, Artificial Sequence
  synthetic
acauggacaaagcaguuaa

SEQ ID NO: 8017 - RNA, 19 nt, Artificial Sequence
  synthetic
cauggacaaagcaguuaaa

SEQ ID NO: 8018 - RNA, 19 nt, Artificial Sequence
  synthetic
auggacaaagcaguuaaac

SEQ ID NO: 8019 - RNA, 19 nt, Artificial Sequence
  synthetic
uggacaaagcaguuaaacu

SEQ ID NO: 8020 - RNA, 19 nt, Artificial Sequence
  synthetic
ggacaaagcaguuaaacug

SEQ ID NO: 8021 - RNA, 19 nt, Artificial Sequence
  synthetic
gacaaagcaguuaaacugu

SEQ ID NO: 8022 - RNA, 19 nt, Artificial Sequence
  synthetic
acaaagcaguuaaacugua

SEQ ID NO: 8023 - RNA, 19 nt, Artificial Sequence
  synthetic
caaagcaguuaaacuguau

SEQ ID NO: 8024 - RNA, 19 nt, Artificial Sequence
  synthetic
aaagcaguuaaacuguaua

SEQ ID NO: 8025 - RNA, 19 nt, Artificial Sequence
  synthetic
aagcaguuaaacuguauag

SEQ ID NO: 8026 - RNA, 19 nt, Artificial Sequence
  synthetic
gaaaacuuaagagggagau

SEQ ID NO: 8027 - RNA, 19 nt, Artificial Sequence
  synthetic
aaacuuaagagggagauaa

SEQ ID NO: 8028 - RNA, 19 nt, Artificial Sequence
  synthetic
aacuuaagagggagauaac

SEQ ID NO: 8029 - RNA, 19 nt, Artificial Sequence
  synthetic
uaacauuccauggggccaa

SEQ ID NO: 8030 - RNA, 19 nt, Artificial Sequence
  synthetic
uuccauggggccaaagaaa

SEQ ID NO: 8031 - RNA, 19 nt, Artificial Sequence
  synthetic
uccauggggccaaagaaau

SEQ ID NO: 8032 - RNA, 19 nt, Artificial Sequence
  synthetic
ccauggggccaaagaaaua

SEQ ID NO: 8033 - RNA, 19 nt, Artificial Sequence
  synthetic
cauggggccaaagaaauag

SEQ ID NO: 8034 - RNA, 19 nt, Artificial Sequence
  synthetic
auggggccaaagaaauagc

SEQ ID NO: 8035 - RNA, 19 nt, Artificial Sequence
  synthetic
aagaaauagcacucaguua

SEQ ID NO: 8036 - RNA, 19 nt, Artificial Sequence
  synthetic
cucaguuauucugcuggug

SEQ ID NO: 8037 - RNA, 19 nt, Artificial Sequence
  synthetic
ucaguuauucugcuggugc

SEQ ID NO: 8038 - RNA, 19 nt, Artificial Sequence
  synthetic
caguuauucugcuggugca

SEQ ID NO: 8039 - RNA, 19 nt, Artificial Sequence
  synthetic
aguuauucugcuggugcac

SEQ ID NO: 8040 - RNA, 19 nt, Artificial Sequence
  synthetic
guuauucugcuggugcacu

SEQ ID NO: 8041 - RNA, 19 nt, Artificial Sequence
  synthetic
uuauucugcuggugcacuu

SEQ ID NO: 8042 - RNA, 19 nt, Artificial Sequence
  synthetic
uauucugcuggugcacuug

SEQ ID NO: 8043 - RNA, 19 nt, Artificial Sequence
  synthetic
auucugcuggugcacuugc

SEQ ID NO: 8044 - RNA, 19 nt, Artificial Sequence
  synthetic
uucugcuggugcacuugcc

SEQ ID NO: 8045 - RNA, 19 nt, Artificial Sequence
  synthetic
ucugcuggugcacuugcca

SEQ ID NO: 8046 - RNA, 19 nt, Artificial Sequence
  synthetic
cugcuggugcacuugccag

SEQ ID NO: 8047 - RNA, 19 nt, Artificial Sequence
  synthetic
ugcuggugcacuugccagu

SEQ ID NO: 8048 - RNA, 19 nt, Artificial Sequence
  synthetic
gcuggugcacuugccaguu

SEQ ID NO: 8049 - RNA, 19 nt, Artificial Sequence
  synthetic
cuggugcacuugccaguug

SEQ ID NO: 8050 - RNA, 19 nt, Artificial Sequence
  synthetic
uggugcacuugccaguugc

SEQ ID NO: 8051 - RNA, 19 nt, Artificial Sequence
  synthetic
ggugcacuugccaguugca

SEQ ID NO: 8052 - RNA, 19 nt, Artificial Sequence
  synthetic
gugcacuugccaguugcau

SEQ ID NO: 8053 - RNA, 19 nt, Artificial Sequence
  synthetic
ugcacuugccaguugcaug

SEQ ID NO: 8054 - RNA, 19 nt, Artificial Sequence
  synthetic
gcacuugccaguugcaugg

SEQ ID NO: 8055 - RNA, 19 nt, Artificial Sequence
  synthetic
cacuugccaguugcauggg

SEQ ID NO: 8056 - RNA, 19 nt, Artificial Sequence
  synthetic
acuugccaguugcaugggc

SEQ ID NO: 8057 - RNA, 19 nt, Artificial Sequence
  synthetic
cuugccaguugcaugggcc

SEQ ID NO: 8058 - RNA, 19 nt, Artificial Sequence
  synthetic
uugccaguugcaugggccu

SEQ ID NO: 8059 - RNA, 19 nt, Artificial Sequence
  synthetic
ugccaguugcaugggccuc

SEQ ID NO: 8060 - RNA, 19 nt, Artificial Sequence
  synthetic
gccaguugcaugggccuca

SEQ ID NO: 8061 - RNA, 19 nt, Artificial Sequence
  synthetic
ccaguugcaugggccucau

SEQ ID NO: 8062 - RNA, 19 nt, Artificial Sequence
  synthetic
caguugcaugggccucaua

SEQ ID NO: 8063 - RNA, 19 nt, Artificial Sequence
  synthetic
aguugcaugggccucauau

SEQ ID NO: 8064 - RNA, 19 nt, Artificial Sequence
  synthetic
guugcaugggccucauaua

SEQ ID NO: 8065 - RNA, 19 nt, Artificial Sequence
  synthetic
uugcaugggccucauauac

SEQ ID NO: 8066 - RNA, 19 nt, Artificial Sequence
  synthetic
ugcaugggccucauauaca

SEQ ID NO: 8067 - RNA, 19 nt, Artificial Sequence
  synthetic
gcaugggccucauauacaa

SEQ ID NO: 8068 - RNA, 19 nt, Artificial Sequence
  synthetic
caugggccucauauacaau

SEQ ID NO: 8069 - RNA, 19 nt, Artificial Sequence
  synthetic
augggccucauauacaaua

SEQ ID NO: 8070 - RNA, 19 nt, Artificial Sequence
  synthetic
ugggccucauauacaauag

SEQ ID NO: 8071 - RNA, 19 nt, Artificial Sequence
  synthetic
uauacaauaggaugggggc

SEQ ID NO: 8072 - RNA, 19 nt, Artificial Sequence
  synthetic
cuguaaccaccgaaguggc

SEQ ID NO: 8073 - RNA, 19 nt, Artificial Sequence
  synthetic
gaaguggcauuuggccugg

SEQ ID NO: 8074 - RNA, 19 nt, Artificial Sequence
  synthetic
aaguggcauuuggccuggu

SEQ ID NO: 8075 - RNA, 19 nt, Artificial Sequence
  synthetic
aguggcauuuggccuggua

SEQ ID NO: 8076 - RNA, 19 nt, Artificial Sequence
  synthetic
guggcauuuggccugguau

SEQ ID NO: 8077 - RNA, 19 nt, Artificial Sequence
  synthetic
uggcauuuggccugguaug

SEQ ID NO: 8078 - RNA, 19 nt, Artificial Sequence
  synthetic
ggcauuuggccugguaugu

SEQ ID NO: 8079 - RNA, 19 nt, Artificial Sequence
  synthetic
gcauuuggccugguaugug

SEQ ID NO: 8080 - RNA, 19 nt, Artificial Sequence
  synthetic
cauuuggccugguaugugc

SEQ ID NO: 8081 - RNA, 19 nt, Artificial Sequence
  synthetic
auuuggccugguaugugca

SEQ ID NO: 8082 - RNA, 19 nt, Artificial Sequence
  synthetic
uuuggccugguaugugcaa

SEQ ID NO: 8083 - RNA, 19 nt, Artificial Sequence
  synthetic
uuggccugguaugugcaac

SEQ ID NO: 8084 - RNA, 19 nt, Artificial Sequence
  synthetic
uggccugguaugugcaaca

SEQ ID NO: 8085 - RNA, 19 nt, Artificial Sequence
  synthetic
ggccugguaugugcaacau

SEQ ID NO: 8086 - RNA, 19 nt, Artificial Sequence
  synthetic
gccugguaugugcaacaug

SEQ ID NO: 8087 - RNA, 19 nt, Artificial Sequence
  synthetic
ccugguaugugcaacaugu

SEQ ID NO: 8088 - RNA, 19 nt, Artificial Sequence
  synthetic
cugguaugugcaacaugug

SEQ ID NO: 8089 - RNA, 19 nt, Artificial Sequence
  synthetic
ugguaugugcaacauguga

SEQ ID NO: 8090 - RNA, 19 nt, Artificial Sequence
  synthetic
gguaugugcaacaugugaa

SEQ ID NO: 8091 - RNA, 19 nt, Artificial Sequence
  synthetic
guaugugcaacaugugaac

SEQ ID NO: 8092 - RNA, 19 nt, Artificial Sequence
  synthetic
uaugugcaacaugugaaca

SEQ ID NO: 8093 - RNA, 19 nt, Artificial Sequence
  synthetic
augugcaacaugugaacag

SEQ ID NO: 8094 - RNA, 19 nt, Artificial Sequence
  synthetic
ugugcaacaugugaacaga

SEQ ID NO: 8095 - RNA, 19 nt, Artificial Sequence
  synthetic
gugcaacaugugaacagau

SEQ ID NO: 8096 - RNA, 19 nt, Artificial Sequence
  synthetic
ugcaacaugugaacagauu

SEQ ID NO: 8097 - RNA, 19 nt, Artificial Sequence
  synthetic
gcaacaugugaacagauug

SEQ ID NO: 8098 - RNA, 19 nt, Artificial Sequence
  synthetic
caacaugugaacagauugc

SEQ ID NO: 8099 - RNA, 19 nt, Artificial Sequence
  synthetic
aacaugugaacagauugcu

SEQ ID NO: 8100 - RNA, 19 nt, Artificial Sequence
  synthetic
acaugugaacagauugcug

SEQ ID NO: 8101 - RNA, 19 nt, Artificial Sequence
  synthetic
caugugaacagauugcuga

SEQ ID NO: 8102 - RNA, 19 nt, Artificial Sequence
  synthetic
augugaacagauugcugac

SEQ ID NO: 8103 - RNA, 19 nt, Artificial Sequence
  synthetic
ugugaacagauugcugacu

SEQ ID NO: 8104 - RNA, 19 nt, Artificial Sequence
  synthetic
gugaacagauugcugacuc

SEQ ID NO: 8105 - RNA, 19 nt, Artificial Sequence
  synthetic
ugaacagauugcugacucc

SEQ ID NO: 8106 - RNA, 19 nt, Artificial Sequence
  synthetic
gaacagauugcugacuccc

SEQ ID NO: 8107 - RNA, 19 nt, Artificial Sequence
  synthetic
aacagauugcugacuccca

SEQ ID NO: 8108 - RNA, 19 nt, Artificial Sequence
  synthetic
acagauugcugacucccag

SEQ ID NO: 8109 - RNA, 19 nt, Artificial Sequence
  synthetic
cagauugcugacucccagc

SEQ ID NO: 8110 - RNA, 19 nt, Artificial Sequence
  synthetic
agauugcugacucccagca

SEQ ID NO: 8111 - RNA, 19 nt, Artificial Sequence
  synthetic
gauugcugacucccagcac

SEQ ID NO: 8112 - RNA, 19 nt, Artificial Sequence
  synthetic
auugcugacucccagcaca

SEQ ID NO: 8113 - RNA, 19 nt, Artificial Sequence
  synthetic
uugcugacucccagcacag

SEQ ID NO: 8114 - RNA, 19 nt, Artificial Sequence
  synthetic
ugcugacucccagcacagg

SEQ ID NO: 8115 - RNA, 19 nt, Artificial Sequence
  synthetic
gcugacucccagcacaggu

SEQ ID NO: 8116 - RNA, 19 nt, Artificial Sequence
  synthetic
cugacucccagcacagguc

SEQ ID NO: 8117 - RNA, 19 nt, Artificial Sequence
  synthetic
cucauaggcaaaugguggc

SEQ ID NO: 8118 - RNA, 19 nt, Artificial Sequence
  synthetic
cauaggcaaaugguggcaa

SEQ ID NO: 8119 - RNA, 19 nt, Artificial Sequence
  synthetic
auaggcaaaugguggcaac

SEQ ID NO: 8120 - RNA, 19 nt, Artificial Sequence
  synthetic
uaggcaaaugguggcaaca

SEQ ID NO: 8121 - RNA, 19 nt, Artificial Sequence
  synthetic
aggcaaaugguggcaacaa

SEQ ID NO: 8122 - RNA, 19 nt, Artificial Sequence
  synthetic
ggcaaaugguggcaacaac

SEQ ID NO: 8123 - RNA, 19 nt, Artificial Sequence
  synthetic
gcaaaugguggcaacaacc

SEQ ID NO: 8124 - RNA, 19 nt, Artificial Sequence
  synthetic
caaaugguggcaacaacca

SEQ ID NO: 8125 - RNA, 19 nt, Artificial Sequence
  synthetic
aaaugguggcaacaaccaa

SEQ ID NO: 8126 - RNA, 19 nt, Artificial Sequence
  synthetic
aaugguggcaacaaccaau

SEQ ID NO: 8127 - RNA, 19 nt, Artificial Sequence
  synthetic
augguggcaacaaccaauc

SEQ ID NO: 8128 - RNA, 19 nt, Artificial Sequence
  synthetic
ugguggcaacaaccaaucc

SEQ ID NO: 8129 - RNA, 19 nt, Artificial Sequence
  synthetic
gguggcaacaaccaaucca

SEQ ID NO: 8130 - RNA, 19 nt, Artificial Sequence
  synthetic
guggcaacaaccaauccau

SEQ ID NO: 8131 - RNA, 19 nt, Artificial Sequence
  synthetic
uggcaacaaccaauccauu

SEQ ID NO: 8132 - RNA, 19 nt, Artificial Sequence
  synthetic
ggcaacaaccaauccauua

SEQ ID NO: 8133 - RNA, 19 nt, Artificial Sequence
  synthetic
gcaacaaccaauccauuaa

SEQ ID NO: 8134 - RNA, 19 nt, Artificial Sequence
  synthetic
caacaaccaauccauuaau

SEQ ID NO: 8135 - RNA, 19 nt, Artificial Sequence
  synthetic
aacaaccaauccauuaaua

SEQ ID NO: 8136 - RNA, 19 nt, Artificial Sequence
  synthetic
acaaccaauccauuaauaa

SEQ ID NO: 8137 - RNA, 19 nt, Artificial Sequence
  synthetic
caaccaauccauuaauaaa

SEQ ID NO: 8138 - RNA, 19 nt, Artificial Sequence
  synthetic
aaccaauccauuaauaaaa

SEQ ID NO: 8139 - RNA, 19 nt, Artificial Sequence
  synthetic
accaauccauuaauaaaac

SEQ ID NO: 8140 - RNA, 19 nt, Artificial Sequence
  synthetic
ccaauccauuaauaaaaca

SEQ ID NO: 8141 - RNA, 19 nt, Artificial Sequence
  synthetic
caauccauuaauaaaacau

SEQ ID NO: 8142 - RNA, 19 nt, Artificial Sequence
  synthetic
aauccauuaauaaaacaug

SEQ ID NO: 8143 - RNA, 19 nt, Artificial Sequence
  synthetic
auccauuaauaaaacauga

SEQ ID NO: 8144 - RNA, 19 nt, Artificial Sequence
  synthetic
uccauuaauaaaacaugag

SEQ ID NO: 8145 - RNA, 19 nt, Artificial Sequence
  synthetic
ccauuaauaaaacaugaga

SEQ ID NO: 8146 - RNA, 19 nt, Artificial Sequence
  synthetic
cauuaauaaaacaugagaa

SEQ ID NO: 8147 - RNA, 19 nt, Artificial Sequence
  synthetic
auuaauaaaacaugagaac

SEQ ID NO: 8148 - RNA, 19 nt, Artificial Sequence
  synthetic
uuaauaaaacaugagaaca

SEQ ID NO: 8149 - RNA, 19 nt, Artificial Sequence
  synthetic
uaauaaaacaugagaacag

SEQ ID NO: 8150 - RNA, 19 nt, Artificial Sequence
  synthetic
aauaaaacaugagaacaga

SEQ ID NO: 8151 - RNA, 19 nt, Artificial Sequence
  synthetic
auaaaacaugagaacagaa

SEQ ID NO: 8152 - RNA, 19 nt, Artificial Sequence
  synthetic
uaaaacaugagaacagaau

SEQ ID NO: 8153 - RNA, 19 nt, Artificial Sequence
  synthetic
aaaacaugagaacagaaug

SEQ ID NO: 8154 - RNA, 19 nt, Artificial Sequence
  synthetic
aaacaugagaacagaaugg

SEQ ID NO: 8155 - RNA, 19 nt, Artificial Sequence
  synthetic
aacaugagaacagaauggu

SEQ ID NO: 8156 - RNA, 19 nt, Artificial Sequence
  synthetic
acaugagaacagaaugguu

SEQ ID NO: 8157 - RNA, 19 nt, Artificial Sequence
  synthetic
caugagaacagaaugguuu

SEQ ID NO: 8158 - RNA, 19 nt, Artificial Sequence
  synthetic
augagaacagaaugguuuu

SEQ ID NO: 8159 - RNA, 19 nt, Artificial Sequence
  synthetic
ugagaacagaaugguuuug

SEQ ID NO: 8160 - RNA, 19 nt, Artificial Sequence
  synthetic
gagaacagaaugguuuugg

SEQ ID NO: 8161 - RNA, 19 nt, Artificial Sequence
  synthetic
agaacagaaugguuuuggc

SEQ ID NO: 8162 - RNA, 19 nt, Artificial Sequence
  synthetic
gaacagaaugguuuuggcc

SEQ ID NO: 8163 - RNA, 19 nt, Artificial Sequence
  synthetic
aacagaaugguuuuggcca

SEQ ID NO: 8164 - RNA, 19 nt, Artificial Sequence
  synthetic
acagaaugguuuuggccag

SEQ ID NO: 8165 - RNA, 19 nt, Artificial Sequence
  synthetic
cagaaugguuuuggccagc

SEQ ID NO: 8166 - RNA, 19 nt, Artificial Sequence
  synthetic
agaaugguuuuggccagca

SEQ ID NO: 8167 - RNA, 19 nt, Artificial Sequence
  synthetic
gaaugguuuuggccagcac

SEQ ID NO: 8168 - RNA, 19 nt, Artificial Sequence
  synthetic
aaugguuuuggccagcacu

SEQ ID NO: 8169 - RNA, 19 nt, Artificial Sequence
  synthetic
augguuuuggccagcacua

SEQ ID NO: 8170 - RNA, 19 nt, Artificial Sequence
  synthetic
ugguuuuggccagcacuac

SEQ ID NO: 8171 - RNA, 19 nt, Artificial Sequence
  synthetic
gguuuuggccagcacuaca

SEQ ID NO: 8172 - RNA, 19 nt, Artificial Sequence
  synthetic
guuuuggccagcacuacag

SEQ ID NO: 8173 - RNA, 19 nt, Artificial Sequence
  synthetic
uuuuggccagcacuacagc

SEQ ID NO: 8174 - RNA, 19 nt, Artificial Sequence
  synthetic
uuuggccagcacuacagcu

SEQ ID NO: 8175 - RNA, 19 nt, Artificial Sequence
  synthetic
uuggccagcacuacagcua

SEQ ID NO: 8176 - RNA, 19 nt, Artificial Sequence
  synthetic
uggccagcacuacagcuaa

SEQ ID NO: 8177 - RNA, 19 nt, Artificial Sequence
  synthetic
ggccagcacuacagcuaag

SEQ ID NO: 8178 - RNA, 19 nt, Artificial Sequence
  synthetic
gccagcacuacagcuaagg

SEQ ID NO: 8179 - RNA, 19 nt, Artificial Sequence
  synthetic
ccagcacuacagcuaaggc

SEQ ID NO: 8180 - RNA, 19 nt, Artificial Sequence
  synthetic
cagcacuacagcuaaggcu

SEQ ID NO: 8181 - RNA, 19 nt, Artificial Sequence
  synthetic
agcacuacagcuaaggcua

SEQ ID NO: 8182 - RNA, 19 nt, Artificial Sequence
  synthetic
gcacuacagcuaaggcuau

SEQ ID NO: 8183 - RNA, 19 nt, Artificial Sequence
  synthetic
cacuacagcuaaggcuaug

SEQ ID NO: 8184 - RNA, 19 nt, Artificial Sequence
  synthetic
acuacagcuaaggcuaugg

SEQ ID NO: 8185 - RNA, 19 nt, Artificial Sequence
  synthetic
cuacagcuaaggcuaugga

SEQ ID NO: 8186 - RNA, 19 nt, Artificial Sequence
  synthetic
uacagcuaaggcuauggag

SEQ ID NO: 8187 - RNA, 19 nt, Artificial Sequence
  synthetic
acagcuaaggcuauggagc

SEQ ID NO: 8188 - RNA, 19 nt, Artificial Sequence
  synthetic
cagcuaaggcuauggagca

SEQ ID NO: 8189 - RNA, 19 nt, Artificial Sequence
  synthetic
agcuaaggcuauggagcaa

SEQ ID NO: 8190 - RNA, 19 nt, Artificial Sequence
  synthetic
gcuaaggcuauggagcaaa

SEQ ID NO: 8191 - RNA, 19 nt, Artificial Sequence
  synthetic
cuaaggcuauggagcaaau

SEQ ID NO: 8192 - RNA, 19 nt, Artificial Sequence
  synthetic
uaaggcuauggagcaaaug

SEQ ID NO: 8193 - RNA, 19 nt, Artificial Sequence
  synthetic
aaggcuauggagcaaaugg

SEQ ID NO: 8194 - RNA, 19 nt, Artificial Sequence
  synthetic
aggcuauggagcaaauggc

SEQ ID NO: 8195 - RNA, 19 nt, Artificial Sequence
  synthetic
ggcuauggagcaaauggcu

SEQ ID NO: 8196 - RNA, 19 nt, Artificial Sequence
  synthetic
gcuauggagcaaauggcug

SEQ ID NO: 8197 - RNA, 19 nt, Artificial Sequence
  synthetic
cuauggagcaaauggcugg

SEQ ID NO: 8198 - RNA, 19 nt, Artificial Sequence
  synthetic
uauggagcaaauggcugga

SEQ ID NO: 8199 - RNA, 19 nt, Artificial Sequence
  synthetic
auggagcaaauggcuggau

SEQ ID NO: 8200 - RNA, 19 nt, Artificial Sequence
  synthetic
uggagcaaauggcuggauc

SEQ ID NO: 8201 - RNA, 19 nt, Artificial Sequence
  synthetic
caaauggcuggaucaagug

SEQ ID NO: 8202 - RNA, 19 nt, Artificial Sequence
  synthetic
aaauggcuggaucaaguga

SEQ ID NO: 8203 - RNA, 19 nt, Artificial Sequence
  synthetic
auggcuggaucaagugagc

SEQ ID NO: 8204 - RNA, 19 nt, Artificial Sequence
  synthetic
uggcuggaucaagugagca

SEQ ID NO: 8205 - RNA, 19 nt, Artificial Sequence
  synthetic
ggcuggaucaagugagcag

SEQ ID NO: 8206 - RNA, 19 nt, Artificial Sequence
  synthetic
gcuggaucaagugagcagg

SEQ ID NO: 8207 - RNA, 19 nt, Artificial Sequence
  synthetic
cuggaucaagugagcaggc

SEQ ID NO: 8208 - RNA, 19 nt, Artificial Sequence
  synthetic
uggaucaagugagcaggca

SEQ ID NO: 8209 - RNA, 19 nt, Artificial Sequence
  synthetic
ggaucaagugagcaggcag

SEQ ID NO: 8210 - RNA, 19 nt, Artificial Sequence
  synthetic
gaucaagugagcaggcagc

SEQ ID NO: 8211 - RNA, 19 nt, Artificial Sequence
  synthetic
ucaagugagcaggcagcgg

SEQ ID NO: 8212 - RNA, 19 nt, Artificial Sequence
  synthetic
caagugagcaggcagcgga

SEQ ID NO: 8213 - RNA, 19 nt, Artificial Sequence
  synthetic
aagugagcaggcagcggag

SEQ ID NO: 8214 - RNA, 19 nt, Artificial Sequence
  synthetic
agugagcaggcagcggagg

SEQ ID NO: 8215 - RNA, 19 nt, Artificial Sequence
  synthetic
gugagcaggcagcggaggc

SEQ ID NO: 8216 - RNA, 19 nt, Artificial Sequence
  synthetic
ugagcaggcagcggaggcc

SEQ ID NO: 8217 - RNA, 19 nt, Artificial Sequence
  synthetic
gagcaggcagcggaggcca

SEQ ID NO: 8218 - RNA, 19 nt, Artificial Sequence
  synthetic
agcaggcagcggaggccau

SEQ ID NO: 8219 - RNA, 19 nt, Artificial Sequence
  synthetic
gcaggcagcggaggccaug

SEQ ID NO: 8220 - RNA, 19 nt, Artificial Sequence
  synthetic
caggcagcggaggccaugg

SEQ ID NO: 8221 - RNA, 19 nt, Artificial Sequence
  synthetic
aggcagcggaggccaugga

SEQ ID NO: 8222 - RNA, 19 nt, Artificial Sequence
  synthetic
uggagauugcuagucaggc

SEQ ID NO: 8223 - RNA, 19 nt, Artificial Sequence
  synthetic
auugcuagucaggccaggc

SEQ ID NO: 8224 - RNA, 19 nt, Artificial Sequence
  synthetic
uugcuagucaggccaggca

SEQ ID NO: 8225 - RNA, 19 nt, Artificial Sequence
  synthetic
ccaggcaaauggugcaggc

SEQ ID NO: 8226 - RNA, 19 nt, Artificial Sequence
  synthetic
caaauggugcaggcaauga

SEQ ID NO: 8227 - RNA, 19 nt, Artificial Sequence
  synthetic
aaauggugcaggcaaugag

SEQ ID NO: 8228 - RNA, 19 nt, Artificial Sequence
  synthetic
caaugagaaccguugggac

SEQ ID NO: 8229 - RNA, 19 nt, Artificial Sequence
  synthetic
ccguugggacucauccuag

SEQ ID NO: 8230 - RNA, 19 nt, Artificial Sequence
  synthetic
cguugggacucauccuagc

SEQ ID NO: 8231 - RNA, 19 nt, Artificial Sequence
  synthetic
guugggacucauccuagcu

SEQ ID NO: 8232 - RNA, 19 nt, Artificial Sequence
  synthetic
uugggacucauccuagcuc

SEQ ID NO: 8233 - RNA, 19 nt, Artificial Sequence
  synthetic
ugggacucauccuagcucc

SEQ ID NO: 8234 - RNA, 19 nt, Artificial Sequence
  synthetic
gggacucauccuagcucca

SEQ ID NO: 8235 - RNA, 19 nt, Artificial Sequence
  synthetic
ggacucauccuagcuccag

SEQ ID NO: 8236 - RNA, 19 nt, Artificial Sequence
  synthetic
gacucauccuagcuccagu

SEQ ID NO: 8237 - RNA, 19 nt, Artificial Sequence
  synthetic
acucauccuagcuccagua

SEQ ID NO: 8238 - RNA, 19 nt, Artificial Sequence
  synthetic
cucauccuagcuccaguac

SEQ ID NO: 8239 - RNA, 19 nt, Artificial Sequence
  synthetic
ucauccuagcuccaguacu

SEQ ID NO: 8240 - RNA, 19 nt, Artificial Sequence
  synthetic
cauccuagcuccaguacug

SEQ ID NO: 8241 - RNA, 19 nt, Artificial Sequence
  synthetic
auccuagcuccaguacugg

SEQ ID NO: 8242 - RNA, 19 nt, Artificial Sequence
  synthetic
uccuagcuccaguacuggu

SEQ ID NO: 8243 - RNA, 19 nt, Artificial Sequence
  synthetic
ccuagcuccaguacugguc

SEQ ID NO: 8244 - RNA, 19 nt, Artificial Sequence
  synthetic
cuagcuccaguacuggucu

SEQ ID NO: 8245 - RNA, 19 nt, Artificial Sequence
  synthetic
uagcuccaguacuggucua

SEQ ID NO: 8246 - RNA, 19 nt, Artificial Sequence
  synthetic
agcuccaguacuggucuaa

SEQ ID NO: 8247 - RNA, 19 nt, Artificial Sequence
  synthetic
gcuccaguacuggucuaag

SEQ ID NO: 8248 - RNA, 19 nt, Artificial Sequence
  synthetic
cuccaguacuggucuaaga

SEQ ID NO: 8249 - RNA, 19 nt, Artificial Sequence
  synthetic
uccaguacuggucuaagag

SEQ ID NO: 8250 - RNA, 19 nt, Artificial Sequence
  synthetic
ccaguacuggucuaagaga

SEQ ID NO: 8251 - RNA, 19 nt, Artificial Sequence
  synthetic
caguacuggucuaagagau

SEQ ID NO: 8252 - RNA, 19 nt, Artificial Sequence
  synthetic
aguacuggucuaagagaug

SEQ ID NO: 8253 - RNA, 19 nt, Artificial Sequence
  synthetic
guacuggucuaagagauga

SEQ ID NO: 8254 - RNA, 19 nt, Artificial Sequence
  synthetic
uacuggucuaagagaugau

SEQ ID NO: 8255 - RNA, 19 nt, Artificial Sequence
  synthetic
acuggucuaagagaugauc

SEQ ID NO: 8256 - RNA, 19 nt, Artificial Sequence
  synthetic
cuggucuaagagaugaucu

SEQ ID NO: 8257 - RNA, 19 nt, Artificial Sequence
  synthetic
uggucuaagagaugaucuu

SEQ ID NO: 8258 - RNA, 19 nt, Artificial Sequence
  synthetic
ggucuaagagaugaucuuc

SEQ ID NO: 8259 - RNA, 19 nt, Artificial Sequence
  synthetic
gucuaagagaugaucuucu

SEQ ID NO: 8260 - RNA, 19 nt, Artificial Sequence
  synthetic
ucuaagagaugaucuucuu

SEQ ID NO: 8261 - RNA, 19 nt, Artificial Sequence
  synthetic
cuaagagaugaucuucuug

SEQ ID NO: 8262 - RNA, 19 nt, Artificial Sequence
  synthetic
uaagagaugaucuucuuga

SEQ ID NO: 8263 - RNA, 19 nt, Artificial Sequence
  synthetic
aagagaugaucuucuugaa

SEQ ID NO: 8264 - RNA, 19 nt, Artificial Sequence
  synthetic
agagaugaucuucuugaaa

SEQ ID NO: 8265 - RNA, 19 nt, Artificial Sequence
  synthetic
gagaugaucuucuugaaaa

SEQ ID NO: 8266 - RNA, 19 nt, Artificial Sequence
  synthetic
agaugaucuucuugaaaau

SEQ ID NO: 8267 - RNA, 19 nt, Artificial Sequence
  synthetic
gaugaucuucuugaaaauu

SEQ ID NO: 8268 - RNA, 19 nt, Artificial Sequence
  synthetic
augaucuucuugaaaauuu

SEQ ID NO: 8269 - RNA, 19 nt, Artificial Sequence
  synthetic
ugaucuucuugaaaauuug

SEQ ID NO: 8270 - RNA, 19 nt, Artificial Sequence
  synthetic
gaucuucuugaaaauuugc

SEQ ID NO: 8271 - RNA, 19 nt, Artificial Sequence
  synthetic
aucuucuugaaaauuugca

SEQ ID NO: 8272 - RNA, 19 nt, Artificial Sequence
  synthetic
ucuucuugaaaauuugcag

SEQ ID NO: 8273 - RNA, 19 nt, Artificial Sequence
  synthetic
cuucuugaaaauuugcaga

SEQ ID NO: 8274 - RNA, 19 nt, Artificial Sequence
  synthetic
uucuugaaaauuugcagac

SEQ ID NO: 8275 - RNA, 19 nt, Artificial Sequence
  synthetic
ucuugaaaauuugcagacc

SEQ ID NO: 8276 - RNA, 19 nt, Artificial Sequence
  synthetic
cuugaaaauuugcagaccu

SEQ ID NO: 8277 - RNA, 19 nt, Artificial Sequence
  synthetic
uugaaaauuugcagaccua

SEQ ID NO: 8278 - RNA, 19 nt, Artificial Sequence
  synthetic
ugaaaauuugcagaccuau

SEQ ID NO: 8279 - RNA, 19 nt, Artificial Sequence
  synthetic
gaaaauuugcagaccuauc

SEQ ID NO: 8280 - RNA, 19 nt, Artificial Sequence
  synthetic
aaaauuugcagaccuauca

SEQ ID NO: 8281 - RNA, 19 nt, Artificial Sequence
  synthetic
aaauuugcagaccuaucag

SEQ ID NO: 8282 - RNA, 19 nt, Artificial Sequence
  synthetic
aauuugcagaccuaucaga

SEQ ID NO: 8283 - RNA, 19 nt, Artificial Sequence
  synthetic
auuugcagaccuaucagaa

SEQ ID NO: 8284 - RNA, 19 nt, Artificial Sequence
  synthetic
uuugcagaccuaucagaaa

SEQ ID NO: 8285 - RNA, 19 nt, Artificial Sequence
  synthetic
uugcagaccuaucagaaac

SEQ ID NO: 8286 - RNA, 19 nt, Artificial Sequence
  synthetic
ugcagaccuaucagaaacg

SEQ ID NO: 8287 - RNA, 19 nt, Artificial Sequence
  synthetic
gcagaccuaucagaaacga

SEQ ID NO: 8288 - RNA, 19 nt, Artificial Sequence
  synthetic
cagaccuaucagaaacgaa

SEQ ID NO: 8289 - RNA, 19 nt, Artificial Sequence
  synthetic
agaccuaucagaaacgaau

SEQ ID NO: 8290 - RNA, 19 nt, Artificial Sequence
  synthetic
gaccuaucagaaacgaaug

SEQ ID NO: 8291 - RNA, 19 nt, Artificial Sequence
  synthetic
accuaucagaaacgaaugg

SEQ ID NO: 8292 - RNA, 19 nt, Artificial Sequence
  synthetic
ccuaucagaaacgaauggg

SEQ ID NO: 8293 - RNA, 19 nt, Artificial Sequence
  synthetic
cuaucagaaacgaaugggg

SEQ ID NO: 8294 - RNA, 19 nt, Artificial Sequence
  synthetic
uaucagaaacgaauggggg

SEQ ID NO: 8295 - RNA, 19 nt, Artificial Sequence
  synthetic
aucagaaacgaaugggggu

SEQ ID NO: 8296 - RNA, 19 nt, Artificial Sequence
  synthetic
ucagaaacgaaugggggug

SEQ ID NO: 8297 - RNA, 19 nt, Artificial Sequence
  synthetic
cagaaacgaaugggggugc

SEQ ID NO: 8298 - RNA, 19 nt, Artificial Sequence
  synthetic
agaaacgaaugggggugca

SEQ ID NO: 8299 - RNA, 19 nt, Artificial Sequence
  synthetic
gaaacgaaugggggugcag

SEQ ID NO: 8300 - RNA, 19 nt, Artificial Sequence
  synthetic
aaacgaaugggggugcaga

SEQ ID NO: 8301 - RNA, 19 nt, Artificial Sequence
  synthetic
aacgaaugggggugcagau

SEQ ID NO: 8302 - RNA, 19 nt, Artificial Sequence
  synthetic
acgaaugggggugcagaug

SEQ ID NO: 8303 - RNA, 19 nt, Artificial Sequence
  synthetic
cgaaugggggugcagaugc

SEQ ID NO: 8304 - RNA, 19 nt, Artificial Sequence
  synthetic
gaaugggggugcagaugca

SEQ ID NO: 8305 - RNA, 19 nt, Artificial Sequence
  synthetic
aaugggggugcagaugcaa

SEQ ID NO: 8306 - RNA, 19 nt, Artificial Sequence
  synthetic
augggggugcagaugcaac

SEQ ID NO: 8307 - RNA, 19 nt, Artificial Sequence
  synthetic
ugggggugcagaugcaacg

SEQ ID NO: 8308 - RNA, 19 nt, Artificial Sequence
  synthetic
gggggugcagaugcaacga

SEQ ID NO: 8309 - RNA, 19 nt, Artificial Sequence
  synthetic
ggggugcagaugcaacgau

SEQ ID NO: 8310 - RNA, 19 nt, Artificial Sequence
  synthetic
gggugcagaugcaacgauu

SEQ ID NO: 8311 - RNA, 19 nt, Artificial Sequence
  synthetic
ggugcagaugcaacgauuc

SEQ ID NO: 8312 - RNA, 19 nt, Artificial Sequence
  synthetic
gugcagaugcaacgauuca

SEQ ID NO: 8313 - RNA, 19 nt, Artificial Sequence
  synthetic
ugcagaugcaacgauucaa

SEQ ID NO: 8314 - RNA, 19 nt, Artificial Sequence
  synthetic
ucaagugacccgcuuguug

SEQ ID NO: 8315 - RNA, 19 nt, Artificial Sequence
  synthetic
guugcugcgaguaucauug

SEQ ID NO: 8316 - RNA, 19 nt, Artificial Sequence
  synthetic
gcgaguaucauugggaucu

SEQ ID NO: 8317 - RNA, 19 nt, Artificial Sequence
  synthetic
cgaguaucauugggaucuu

SEQ ID NO: 8318 - RNA, 19 nt, Artificial Sequence
  synthetic
gaguaucauugggaucuug

SEQ ID NO: 8319 - RNA, 19 nt, Artificial Sequence
  synthetic
aguaucauugggaucuugc

SEQ ID NO: 8320 - RNA, 19 nt, Artificial Sequence
  synthetic
guaucauugggaucuugca

SEQ ID NO: 8321 - RNA, 19 nt, Artificial Sequence
  synthetic
uaucauugggaucuugcac

SEQ ID NO: 8322 - RNA, 19 nt, Artificial Sequence
  synthetic
aucauugggaucuugcacu

SEQ ID NO: 8323 - RNA, 19 nt, Artificial Sequence
  synthetic
ucauugggaucuugcacuu

SEQ ID NO: 8324 - RNA, 19 nt, Artificial Sequence
  synthetic
cauugggaucuugcacuug

SEQ ID NO: 8325 - RNA, 19 nt, Artificial Sequence
  synthetic
auugggaucuugcacuuga

SEQ ID NO: 8326 - RNA, 19 nt, Artificial Sequence
  synthetic
uugggaucuugcacuugau

SEQ ID NO: 8327 - RNA, 19 nt, Artificial Sequence
  synthetic
ugggaucuugcacuugaua

SEQ ID NO: 8328 - RNA, 19 nt, Artificial Sequence
  synthetic
gggaucuugcacuugauau

SEQ ID NO: 8329 - RNA, 19 nt, Artificial Sequence
  synthetic
uuguggauucuugaucguc

SEQ ID NO: 8330 - RNA, 19 nt, Artificial Sequence
  synthetic
uguggauucuugaucgucu

SEQ ID NO: 8331 - RNA, 19 nt, Artificial Sequence
  synthetic
guggauucuugaucgucuu

SEQ ID NO: 8332 - RNA, 19 nt, Artificial Sequence
  synthetic
uggauucuugaucgucuuu

SEQ ID NO: 8333 - RNA, 19 nt, Artificial Sequence
  synthetic
ggauucuugaucgucuuuu

SEQ ID NO: 8334 - RNA, 19 nt, Artificial Sequence
  synthetic
gauucuugaucgucuuuuu

SEQ ID NO: 8335 - RNA, 19 nt, Artificial Sequence
  synthetic
auucuugaucgucuuuuuu

SEQ ID NO: 8336 - RNA, 19 nt, Artificial Sequence
  synthetic
uucuugaucgucuuuuuuu

SEQ ID NO: 8337 - RNA, 19 nt, Artificial Sequence
  synthetic
ucuugaucgucuuuuuuuc

SEQ ID NO: 8338 - RNA, 19 nt, Artificial Sequence
  synthetic
cuugaucgucuuuuuuuca

SEQ ID NO: 8339 - RNA, 19 nt, Artificial Sequence
  synthetic
uugaucgucuuuuuuucaa

SEQ ID NO: 8340 - RNA, 19 nt, Artificial Sequence
  synthetic
ugaucgucuuuuuuucaaa

SEQ ID NO: 8341 - RNA, 19 nt, Artificial Sequence
  synthetic
gaucgucuuuuuuucaaau

SEQ ID NO: 8342 - RNA, 19 nt, Artificial Sequence
  synthetic
aucgucuuuuuuucaaaug

SEQ ID NO: 8343 - RNA, 19 nt, Artificial Sequence
  synthetic
ucgucuuuuuuucaaaugc

SEQ ID NO: 8344 - RNA, 19 nt, Artificial Sequence
  synthetic
cuuuuuuucaaaugcaucu

SEQ ID NO: 8345 - RNA, 19 nt, Artificial Sequence
  synthetic
uaucgacucuucaaacacg

SEQ ID NO: 8346 - RNA, 19 nt, Artificial Sequence
  synthetic
ggccugaaaagagggccuu

SEQ ID NO: 8347 - RNA, 19 nt, Artificial Sequence
  synthetic
ccuucuacggaaggaguac

SEQ ID NO: 8348 - RNA, 19 nt, Artificial Sequence
  synthetic
cuucuacggaaggaguacc

SEQ ID NO: 8349 - RNA, 19 nt, Artificial Sequence
  synthetic
uucuacggaaggaguaccu

SEQ ID NO: 8350 - RNA, 19 nt, Artificial Sequence
  synthetic
ucuacggaaggaguaccug

SEQ ID NO: 8351 - RNA, 19 nt, Artificial Sequence
  synthetic
cuacggaaggaguaccuga

SEQ ID NO: 8352 - RNA, 19 nt, Artificial Sequence
  synthetic
uacggaaggaguaccugag

SEQ ID NO: 8353 - RNA, 19 nt, Artificial Sequence
  synthetic
acggaaggaguaccugagu

SEQ ID NO: 8354 - RNA, 19 nt, Artificial Sequence
  synthetic
cggaaggaguaccugaguc

SEQ ID NO: 8355 - RNA, 19 nt, Artificial Sequence
  synthetic
ggaaggaguaccugagucu

SEQ ID NO: 8356 - RNA, 19 nt, Artificial Sequence
  synthetic
gaaggaguaccugagucua

SEQ ID NO: 8357 - RNA, 19 nt, Artificial Sequence
  synthetic
aaggaguaccugagucuau

SEQ ID NO: 8358 - RNA, 19 nt, Artificial Sequence
  synthetic
aggaguaccugagucuaug

SEQ ID NO: 8359 - RNA, 19 nt, Artificial Sequence
  synthetic
ggaguaccugagucuauga

SEQ ID NO: 8360 - RNA, 19 nt, Artificial Sequence
  synthetic
gaguaccugagucuaugag

SEQ ID NO: 8361 - RNA, 19 nt, Artificial Sequence
  synthetic
aguaccugagucuaugagg

SEQ ID NO: 8362 - RNA, 19 nt, Artificial Sequence
  synthetic
guaccugagucuaugaggg

SEQ ID NO: 8363 - RNA, 19 nt, Artificial Sequence
  synthetic
uaccugagucuaugaggga

SEQ ID NO: 8364 - RNA, 19 nt, Artificial Sequence
  synthetic
accugagucuaugagggaa

SEQ ID NO: 8365 - RNA, 19 nt, Artificial Sequence
  synthetic
ccugagucuaugagggaag

SEQ ID NO: 8366 - RNA, 19 nt, Artificial Sequence
  synthetic
cugagucuaugagggaaga

SEQ ID NO: 8367 - RNA, 19 nt, Artificial Sequence
  synthetic
ugagucuaugagggaagaa

SEQ ID NO: 8368 - RNA, 19 nt, Artificial Sequence
  synthetic
gagucuaugagggaagaau

SEQ ID NO: 8369 - RNA, 19 nt, Artificial Sequence
  synthetic
agucuaugagggaagaaua

SEQ ID NO: 8370 - RNA, 19 nt, Artificial Sequence
  synthetic
gucuaugagggaagaauau

SEQ ID NO: 8371 - RNA, 19 nt, Artificial Sequence
  synthetic
ucuaugagggaagaauauc

SEQ ID NO: 8372 - RNA, 19 nt, Artificial Sequence
  synthetic
cuaugagggaagaauaucg

SEQ ID NO: 8373 - RNA, 19 nt, Artificial Sequence
  synthetic
uaugagggaagaauaucga

SEQ ID NO: 8374 - RNA, 19 nt, Artificial Sequence
  synthetic
augagggaagaauaucgaa

SEQ ID NO: 8375 - RNA, 19 nt, Artificial Sequence
  synthetic
ugagggaagaauaucgaaa

SEQ ID NO: 8376 - RNA, 19 nt, Artificial Sequence
  synthetic
gagggaagaauaucgaaag

SEQ ID NO: 8377 - RNA, 19 nt, Artificial Sequence
  synthetic
agggaagaauaucgaaagg

SEQ ID NO: 8378 - RNA, 19 nt, Artificial Sequence
  synthetic
gggaagaauaucgaaagga

SEQ ID NO: 8379 - RNA, 19 nt, Artificial Sequence
  synthetic
ggaagaauaucgaaaggaa

SEQ ID NO: 8380 - RNA, 19 nt, Artificial Sequence
  synthetic
gaagaauaucgaaaggaac

SEQ ID NO: 8381 - RNA, 19 nt, Artificial Sequence
  synthetic
aagaauaucgaaaggaaca

SEQ ID NO: 8382 - RNA, 19 nt, Artificial Sequence
  synthetic
agaauaucgaaaggaacag

SEQ ID NO: 8383 - RNA, 19 nt, Artificial Sequence
  synthetic
gaauaucgaaaggaacagc

SEQ ID NO: 8384 - RNA, 19 nt, Artificial Sequence
  synthetic
aauaucgaaaggaacagca

SEQ ID NO: 8385 - RNA, 19 nt, Artificial Sequence
  synthetic
auaucgaaaggaacagcag

SEQ ID NO: 8386 - RNA, 19 nt, Artificial Sequence
  synthetic
uaucgaaaggaacagcaga

SEQ ID NO: 8387 - RNA, 19 nt, Artificial Sequence
  synthetic
aucgaaaggaacagcagaa

SEQ ID NO: 8388 - RNA, 19 nt, Artificial Sequence
  synthetic
ucgaaaggaacagcagaau

SEQ ID NO: 8389 - RNA, 19 nt, Artificial Sequence
  synthetic
cgaaaggaacagcagaaug

SEQ ID NO: 8390 - RNA, 19 nt, Artificial Sequence
  synthetic
gaaaggaacagcagaaugc

SEQ ID NO: 8391 - RNA, 19 nt, Artificial Sequence
  synthetic
aaaggaacagcagaaugcu

SEQ ID NO: 8392 - RNA, 19 nt, Artificial Sequence
  synthetic
aaggaacagcagaaugcug

SEQ ID NO: 8393 - RNA, 19 nt, Artificial Sequence
  synthetic
aggaacagcagaaugcugu

SEQ ID NO: 8394 - RNA, 19 nt, Artificial Sequence
  synthetic
ggaacagcagaaugcugug

SEQ ID NO: 8395 - RNA, 19 nt, Artificial Sequence
  synthetic
gaacagcagaaugcugugg

SEQ ID NO: 8396 - RNA, 19 nt, Artificial Sequence
  synthetic
aacagcagaaugcugugga

SEQ ID NO: 8397 - RNA, 19 nt, Artificial Sequence
  synthetic
acagcagaaugcuguggau

SEQ ID NO: 8398 - RNA, 19 nt, Artificial Sequence
  synthetic
cagcagaaugcuguggaug

SEQ ID NO: 8399 - RNA, 19 nt, Artificial Sequence
  synthetic
agcagaaugcuguggaugc

SEQ ID NO: 8400 - RNA, 19 nt, Artificial Sequence
  synthetic
gcagaaugcuguggaugcu

SEQ ID NO: 8401 - RNA, 19 nt, Artificial Sequence
  synthetic
cagaaugcuguggaugcug

SEQ ID NO: 8402 - RNA, 19 nt, Artificial Sequence
  synthetic
agaaugcuguggaugcuga

SEQ ID NO: 8403 - RNA, 19 nt, Artificial Sequence
  synthetic
gaaugcuguggaugcugac

SEQ ID NO: 8404 - RNA, 19 nt, Artificial Sequence
  synthetic
aaugcuguggaugcugacg

SEQ ID NO: 8405 - RNA, 19 nt, Artificial Sequence
  synthetic
augcuguggaugcugacga

SEQ ID NO: 8406 - RNA, 19 nt, Artificial Sequence
  synthetic
ugcuguggaugcugacgac

SEQ ID NO: 8407 - RNA, 19 nt, Artificial Sequence
  synthetic
gcuguggaugcugacgaca

SEQ ID NO: 8408 - RNA, 19 nt, Artificial Sequence
  synthetic
cuguggaugcugacgacag

SEQ ID NO: 8409 - RNA, 19 nt, Artificial Sequence
  synthetic
uguggaugcugacgacagu

SEQ ID NO: 8410 - RNA, 19 nt, Artificial Sequence
  synthetic
guggaugcugacgacaguc

SEQ ID NO: 8411 - RNA, 19 nt, Artificial Sequence
  synthetic
uggaugcugacgacaguca

SEQ ID NO: 8412 - RNA, 19 nt, Artificial Sequence
  synthetic
ggaugcugacgacagucau

SEQ ID NO: 8413 - RNA, 19 nt, Artificial Sequence
  synthetic
gaugcugacgacagucauu

SEQ ID NO: 8414 - RNA, 19 nt, Artificial Sequence
  synthetic
augcugacgacagucauuu

SEQ ID NO: 8415 - RNA, 19 nt, Artificial Sequence
  synthetic
ugcugacgacagucauuuu

SEQ ID NO: 8416 - RNA, 19 nt, Artificial Sequence
  synthetic
gcugacgacagucauuuug

SEQ ID NO: 8417 - RNA, 19 nt, Artificial Sequence
  synthetic
cugacgacagucauuuugu

SEQ ID NO: 8418 - RNA, 19 nt, Artificial Sequence
  synthetic
ugacgacagucauuuuguc

SEQ ID NO: 8419 - RNA, 19 nt, Artificial Sequence
  synthetic
gacgacagucauuuuguca

SEQ ID NO: 8420 - RNA, 19 nt, Artificial Sequence
  synthetic
acgacagucauuuugucag

SEQ ID NO: 8421 - RNA, 19 nt, Artificial Sequence
  synthetic
cgacagucauuuugucagc

SEQ ID NO: 8422 - RNA, 19 nt, Artificial Sequence
  synthetic
gacagucauuuugucagca

SEQ ID NO: 8423 - RNA, 19 nt, Artificial Sequence
  synthetic
acagucauuuugucagcau

SEQ ID NO: 8424 - RNA, 19 nt, Artificial Sequence
  synthetic
cagucauuuugucagcaua

SEQ ID NO: 8425 - RNA, 19 nt, Artificial Sequence
  synthetic
agucauuuugucagcauag

SEQ ID NO: 8426 - RNA, 19 nt, Artificial Sequence
  synthetic
gucauuuugucagcauaga

SEQ ID NO: 8427 - RNA, 19 nt, Artificial Sequence
  synthetic
ucauuuugucagcauagag

SEQ ID NO: 8428 - RNA, 19 nt, Artificial Sequence
  synthetic
auagagcuggaguaaaaaa

SEQ ID NO: 8429 - RNA, 19 nt, Artificial Sequence
  synthetic
uggaguaaaaaacuaccuu

SEQ ID NO: 8430 - RNA, 19 nt, Artificial Sequence
  synthetic
ggaguaaaaaacuaccuug

SEQ ID NO: 8431 - RNA, 19 nt, Artificial Sequence
  synthetic
gaguaaaaaacuaccuugu

SEQ ID NO: 8432 - RNA, 19 nt, Artificial Sequence
  synthetic
aguaaaaaacuaccuuguu

SEQ ID NO: 8433 - RNA, 19 nt, Artificial Sequence
  synthetic
guaaaaaacuaccuuguuu

SEQ ID NO: 8434 - RNA, 19 nt, Artificial Sequence
  synthetic
uaaaaaacuaccuuguuuc

SEQ ID NO: 8435 - RNA, 19 nt, Artificial Sequence
  synthetic
aaaaaacuaccuuguuucu

SEQ ID NO: 8436 - RNA, 19 nt, Artificial Sequence
  synthetic
aaaaacuaccuuguuucua

SEQ ID NO: 8437 - RNA, 19 nt, Artificial Sequence
  synthetic
ggucuugucuuuagccauu

SEQ ID NO: 8438 - RNA, 19 nt, Artificial Sequence
  synthetic
ggcaagugcaccagcagaa

SEQ ID NO: 8439 - RNA, 19 nt, Artificial Sequence
  synthetic
gucugcaaauuuucaagaa

SEQ ID NO: 8440 - RNA, 19 nt, Artificial Sequence
  synthetic
gaaggcucaucuuucaaua

SEQ ID NO: 8441 - RNA, 19 nt, Artificial Sequence
  synthetic
gcucaucuuucaauaucua

SEQ ID NO: 8442 - RNA, 19 nt, Artificial Sequence
  synthetic
ucgucagcauccacagcau

SEQ ID NO: 8443 - RNA, 19 nt, Artificial Sequence
  synthetic
ccugauggaacgauagaga

SEQ ID NO: 8444 - RNA, 19 nt, Artificial Sequence
  synthetic
uucccagcaaagacaucuu

SEQ ID NO: 8445 - RNA, 19 nt, Artificial Sequence
  synthetic
caauaucuaccugcuuuug

SEQ ID NO: 8446 - RNA, 19 nt, Artificial Sequence
  synthetic
ucaauaucuaccugcuuuu

SEQ ID NO: 8447 - RNA, 19 nt, Artificial Sequence
  synthetic
uucaauaucuaccugcuuu

SEQ ID NO: 8448 - RNA, 19 nt, Artificial Sequence
  synthetic
uuucaauaucuaccugcuu

SEQ ID NO: 8449 - RNA, 19 nt, Artificial Sequence
  synthetic
cuuucaauaucuaccugcu

SEQ ID NO: 8450 - RNA, 19 nt, Artificial Sequence
  synthetic
ucuuucaauaucuaccugc

SEQ ID NO: 8451 - RNA, 19 nt, Artificial Sequence
  synthetic
aucuuucaauaucuaccug

SEQ ID NO: 8452 - RNA, 19 nt, Artificial Sequence
  synthetic
caucuuucaauaucuaccu

SEQ ID NO: 8453 - RNA, 19 nt, Artificial Sequence
  synthetic
ucaucuuucaauaucuacc

SEQ ID NO: 8454 - RNA, 19 nt, Artificial Sequence
  synthetic
cucaucuuucaauaucuac

SEQ ID NO: 8455 - RNA, 19 nt, Artificial Sequence
  synthetic
gcucaucuuucaauaucua

SEQ ID NO: 8456 - RNA, 19 nt, Artificial Sequence
  synthetic
ggcucaucuuucaauaucu

SEQ ID NO: 8457 - RNA, 19 nt, Artificial Sequence
  synthetic
aggcucaucuuucaauauc

SEQ ID NO: 8458 - RNA, 19 nt, Artificial Sequence
  synthetic
aaggcucaucuuucaauau

SEQ ID NO: 8459 - RNA, 19 nt, Artificial Sequence
  synthetic
gaaggcucaucuuucaaua

SEQ ID NO: 8460 - RNA, 19 nt, Artificial Sequence
  synthetic
agaaggcucaucuuucaau

SEQ ID NO: 8461 - RNA, 19 nt, Artificial Sequence
  synthetic
uagaaggcucaucuuucaa

SEQ ID NO: 8462 - RNA, 19 nt, Artificial Sequence
  synthetic
uuagaaggcucaucuuuca

SEQ ID NO: 8463 - RNA, 19 nt, Artificial Sequence
  synthetic
guuagaaggcucaucuuuc

SEQ ID NO: 8464 - RNA, 19 nt, Artificial Sequence
  synthetic
acauacguuucgaccucgg

SEQ ID NO: 8465 - RNA, 19 nt, Artificial Sequence
  synthetic
gaacauacguuucgaccuc

SEQ ID NO: 8466 - RNA, 19 nt, Artificial Sequence
  synthetic
agaacauacguuucgaccu

SEQ ID NO: 8467 - RNA, 19 nt, Artificial Sequence
  synthetic
gagaacauacguuucgacc

SEQ ID NO: 8468 - RNA, 19 nt, Artificial Sequence
  synthetic
agagaacauacguuucgac

SEQ ID NO: 8469 - RNA, 19 nt, Artificial Sequence
  synthetic
gagagaacauacguuucga

SEQ ID NO: 8470 - RNA, 19 nt, Artificial Sequence
  synthetic
agagagaacauacguuucg

SEQ ID NO: 8471 - RNA, 19 nt, Artificial Sequence
  synthetic
uagagagaacauacguuuc

SEQ ID NO: 8472 - RNA, 19 nt, Artificial Sequence
  synthetic
auagagagaacauacguuu

SEQ ID NO: 8473 - RNA, 19 nt, Artificial Sequence
  synthetic
gauagagagaacauacguu

SEQ ID NO: 8474 - RNA, 19 nt, Artificial Sequence
  synthetic
cgauagagagaacauacgu

SEQ ID NO: 8475 - RNA, 19 nt, Artificial Sequence
  synthetic
acgauagagagaacauacg

SEQ ID NO: 8476 - RNA, 19 nt, Artificial Sequence
  synthetic
aacgauagagagaacauac

SEQ ID NO: 8477 - RNA, 19 nt, Artificial Sequence
  synthetic
gaacgauagagagaacaua

SEQ ID NO: 8478 - RNA, 19 nt, Artificial Sequence
  synthetic
ggaacgauagagagaacau

SEQ ID NO: 8479 - RNA, 19 nt, Artificial Sequence
  synthetic
uggaacgauagagagaaca

SEQ ID NO: 8480 - RNA, 19 nt, Artificial Sequence
  synthetic
auggaacgauagagagaac

SEQ ID NO: 8481 - RNA, 19 nt, Artificial Sequence
  synthetic
gauggaacgauagagagaa

SEQ ID NO: 8482 - RNA, 19 nt, Artificial Sequence
  synthetic
ugauggaacgauagagaga

SEQ ID NO: 8483 - RNA, 19 nt, Artificial Sequence
  synthetic
cugauggaacgauagagag

SEQ ID NO: 8484 - RNA, 19 nt, Artificial Sequence
  synthetic
ccugauggaacgauagaga

SEQ ID NO: 8485 - RNA, 19 nt, Artificial Sequence
  synthetic
gccugauggaacgauagag

SEQ ID NO: 8486 - RNA, 19 nt, Artificial Sequence
  synthetic
ggccugauggaacgauaga

SEQ ID NO: 8487 - RNA, 19 nt, Artificial Sequence
  synthetic
gggccugauggaacgauag

SEQ ID NO: 8488 - RNA, 19 nt, Artificial Sequence
  synthetic
ggggccugauggaacgaua

SEQ ID NO: 8489 - RNA, 19 nt, Artificial Sequence
  synthetic
gggggccugauggaacgau

SEQ ID NO: 8490 - RNA, 19 nt, Artificial Sequence
  synthetic
agggggccugauggaacga

SEQ ID NO: 8491 - RNA, 19 nt, Artificial Sequence
  synthetic
gagggggccugauggaacg

SEQ ID NO: 8492 - RNA, 19 nt, Artificial Sequence
  synthetic
ugagggggccugauggaac

SEQ ID NO: 8493 - RNA, 19 nt, Artificial Sequence
  synthetic
uugagggggccugauggaa

SEQ ID NO: 8494 - RNA, 19 nt, Artificial Sequence
  synthetic
uuugagggggccugaugga

SEQ ID NO: 8495 - RNA, 19 nt, Artificial Sequence
  synthetic
cuuugagggggccugaugg

SEQ ID NO: 8496 - RNA, 19 nt, Artificial Sequence
  synthetic
gcuuugagggggccugaug

SEQ ID NO: 8497 - RNA, 19 nt, Artificial Sequence
  synthetic
ggcuuugagggggccugau

SEQ ID NO: 8498 - RNA, 19 nt, Artificial Sequence
  synthetic
cggcuuugagggggccuga

SEQ ID NO: 8499 - RNA, 19 nt, Artificial Sequence
  synthetic
ucggcuuugagggggccug

SEQ ID NO: 8500 - RNA, 19 nt, Artificial Sequence
  synthetic
ucaagucucugcgcgauuu

SEQ ID NO: 8501 - RNA, 19 nt, Artificial Sequence
  synthetic
cuucaagucucugcgcgau

SEQ ID NO: 8502 - RNA, 19 nt, Artificial Sequence
  synthetic
ucuucaagucucugcgcga

SEQ ID NO: 8503 - RNA, 19 nt, Artificial Sequence
  synthetic
aucuucaagucucugcgcg

SEQ ID NO: 8504 - RNA, 19 nt, Artificial Sequence
  synthetic
caucuucaagucucugcgc

SEQ ID NO: 8505 - RNA, 19 nt, Artificial Sequence
  synthetic
acaucuucaagucucugcg

SEQ ID NO: 8506 - RNA, 19 nt, Artificial Sequence
  synthetic
gacaucuucaagucucugc

SEQ ID NO: 8507 - RNA, 19 nt, Artificial Sequence
  synthetic
agacaucuucaagucucug

SEQ ID NO: 8508 - RNA, 19 nt, Artificial Sequence
  synthetic
aagacaucuucaagucucu

SEQ ID NO: 8509 - RNA, 19 nt, Artificial Sequence
  synthetic
aaagacaucuucaagucuc

SEQ ID NO: 8510 - RNA, 19 nt, Artificial Sequence
  synthetic
caaagacaucuucaagucu

SEQ ID NO: 8511 - RNA, 19 nt, Artificial Sequence
  synthetic
gcaaagacaucuucaaguc

SEQ ID NO: 8512 - RNA, 19 nt, Artificial Sequence
  synthetic
agcaaagacaucuucaagu

SEQ ID NO: 8513 - RNA, 19 nt, Artificial Sequence
  synthetic
cagcaaagacaucuucaag

SEQ ID NO: 8514 - RNA, 19 nt, Artificial Sequence
  synthetic
ccagcaaagacaucuucaa

SEQ ID NO: 8515 - RNA, 19 nt, Artificial Sequence
  synthetic
cccagcaaagacaucuuca

SEQ ID NO: 8516 - RNA, 19 nt, Artificial Sequence
  synthetic
ucccagcaaagacaucuuc

SEQ ID NO: 8517 - RNA, 19 nt, Artificial Sequence
  synthetic
uucccagcaaagacaucuu

SEQ ID NO: 8518 - RNA, 19 nt, Artificial Sequence
  synthetic
uuucccagcaaagacaucu

SEQ ID NO: 8519 - RNA, 19 nt, Artificial Sequence
  synthetic
uuuucccagcaaagacauc

SEQ ID NO: 8520 - RNA, 19 nt, Artificial Sequence
  synthetic
uuuuucccagcaaagacau

SEQ ID NO: 8521 - RNA, 19 nt, Artificial Sequence
  synthetic
guuuuucccagcaaagaca

SEQ ID NO: 8522 - RNA, 19 nt, Artificial Sequence
  synthetic
uguuuuucccagcaaagac

SEQ ID NO: 8523 - RNA, 19 nt, Artificial Sequence
  synthetic
guguuuuucccagcaaaga

SEQ ID NO: 8524 - RNA, 19 nt, Artificial Sequence
  synthetic
uguguuuuucccagcaaag

SEQ ID NO: 8525 - RNA, 19 nt, Artificial Sequence
  synthetic
cuguguuuuucccagcaaa

SEQ ID NO: 8526 - RNA, 19 nt, Artificial Sequence
  synthetic
ucuguguuuuucccagcaa

SEQ ID NO: 8527 - RNA, 19 nt, Artificial Sequence
  synthetic
aucuguguuuuucccagca

SEQ ID NO: 8528 - RNA, 19 nt, Artificial Sequence
  synthetic
gaucuguguuuuucccagc

SEQ ID NO: 8529 - RNA, 19 nt, Artificial Sequence
  synthetic
agaucuguguuuuucccag

SEQ ID NO: 8530 - RNA, 19 nt, Artificial Sequence
  synthetic
aagaucuguguuuuuccca

SEQ ID NO: 8531 - RNA, 19 nt, Artificial Sequence
  synthetic
caagaucuguguuuuuccc

SEQ ID NO: 8532 - RNA, 19 nt, Artificial Sequence
  synthetic
ucaagaucuguguuuuucc

SEQ ID NO: 8533 - RNA, 19 nt, Artificial Sequence
  synthetic
cucaagaucuguguuuuuc

SEQ ID NO: 8534 - RNA, 19 nt, Artificial Sequence
  synthetic
ccucaagaucuguguuuuu

SEQ ID NO: 8535 - RNA, 19 nt, Artificial Sequence
  synthetic
gccucaagaucuguguuuu

SEQ ID NO: 8536 - RNA, 19 nt, Artificial Sequence
  synthetic
agccucaagaucuguguuu

SEQ ID NO: 8537 - RNA, 19 nt, Artificial Sequence
  synthetic
gagccucaagaucuguguu

SEQ ID NO: 8538 - RNA, 19 nt, Artificial Sequence
  synthetic
agagccucaagaucugugu

SEQ ID NO: 8539 - RNA, 19 nt, Artificial Sequence
  synthetic
gagagccucaagaucugug

SEQ ID NO: 8540 - RNA, 19 nt, Artificial Sequence
  synthetic
ugagagccucaagaucugu

SEQ ID NO: 8541 - RNA, 19 nt, Artificial Sequence
  synthetic
augagagccucaagaucug

SEQ ID NO: 8542 - RNA, 19 nt, Artificial Sequence
  synthetic
caugagagccucaagaucu

SEQ ID NO: 8543 - RNA, 19 nt, Artificial Sequence
  synthetic
ccaugagagccucaagauc

SEQ ID NO: 8544 - RNA, 19 nt, Artificial Sequence
  synthetic
uccaugagagccucaagau

SEQ ID NO: 8545 - RNA, 19 nt, Artificial Sequence
  synthetic
uuccaugagagccucaaga

SEQ ID NO: 8546 - RNA, 19 nt, Artificial Sequence
  synthetic
auuccaugagagccucaag

SEQ ID NO: 8547 - RNA, 19 nt, Artificial Sequence
  synthetic
cauuccaugagagccucaa

SEQ ID NO: 8548 - RNA, 19 nt, Artificial Sequence
  synthetic
ccauuccaugagagccuca

SEQ ID NO: 8549 - RNA, 19 nt, Artificial Sequence
  synthetic
gccauuccaugagagccuc

SEQ ID NO: 8550 - RNA, 19 nt, Artificial Sequence
  synthetic
agccauuccaugagagccu

SEQ ID NO: 8551 - RNA, 19 nt, Artificial Sequence
  synthetic
uagccauuccaugagagcc

SEQ ID NO: 8552 - RNA, 19 nt, Artificial Sequence
  synthetic
uuagccauuccaugagagc

SEQ ID NO: 8553 - RNA, 19 nt, Artificial Sequence
  synthetic
uuuagccauuccaugagag

SEQ ID NO: 8554 - RNA, 19 nt, Artificial Sequence
  synthetic
cuuuagccauuccaugaga

SEQ ID NO: 8555 - RNA, 19 nt, Artificial Sequence
  synthetic
ucuuuagccauuccaugag

SEQ ID NO: 8556 - RNA, 19 nt, Artificial Sequence
  synthetic
gucuuuagccauuccauga

SEQ ID NO: 8557 - RNA, 19 nt, Artificial Sequence
  synthetic
ugucuuuagccauuccaug

SEQ ID NO: 8558 - RNA, 19 nt, Artificial Sequence
  synthetic
uugucuuuagccauuccau

SEQ ID NO: 8559 - RNA, 19 nt, Artificial Sequence
  synthetic
cuugucuuuagccauucca

SEQ ID NO: 8560 - RNA, 19 nt, Artificial Sequence
  synthetic
ucuugucuuuagccauucc

SEQ ID NO: 8561 - RNA, 19 nt, Artificial Sequence
  synthetic
gucuugucuuuagccauuc

SEQ ID NO: 8562 - RNA, 19 nt, Artificial Sequence
  synthetic
ggucuugucuuuagccauu

SEQ ID NO: 8563 - RNA, 19 nt, Artificial Sequence
  synthetic
uggucuugucuuuagccau

SEQ ID NO: 8564 - RNA, 19 nt, Artificial Sequence
  synthetic
uuggucuugucuuuagcca

SEQ ID NO: 8565 - RNA, 19 nt, Artificial Sequence
  synthetic
auuggucuugucuuuagcc

SEQ ID NO: 8566 - RNA, 19 nt, Artificial Sequence
  synthetic
gacaggauuggucuugucu

SEQ ID NO: 8567 - RNA, 19 nt, Artificial Sequence
  synthetic
ccuuagucagaggugacag

SEQ ID NO: 8568 - RNA, 19 nt, Artificial Sequence
  synthetic
cccuuagucagaggugaca

SEQ ID NO: 8569 - RNA, 19 nt, Artificial Sequence
  synthetic
ccccuuagucagaggugac

SEQ ID NO: 8570 - RNA, 19 nt, Artificial Sequence
  synthetic
uccccuuagucagagguga

SEQ ID NO: 8571 - RNA, 19 nt, Artificial Sequence
  synthetic
auccccuuagucagaggug

SEQ ID NO: 8572 - RNA, 19 nt, Artificial Sequence
  synthetic
aauccccuuagucagaggu

SEQ ID NO: 8573 - RNA, 19 nt, Artificial Sequence
  synthetic
aaauccccuuagucagagg

SEQ ID NO: 8574 - RNA, 19 nt, Artificial Sequence
  synthetic
aaaauccccuuagucagag

SEQ ID NO: 8575 - RNA, 19 nt, Artificial Sequence
  synthetic
caaaauccccuuagucaga

SEQ ID NO: 8576 - RNA, 19 nt, Artificial Sequence
  synthetic
ccaaaauccccuuagucag

SEQ ID NO: 8577 - RNA, 19 nt, Artificial Sequence
  synthetic
cccaaaauccccuuaguca

SEQ ID NO: 8578 - RNA, 19 nt, Artificial Sequence
  synthetic
ccccaaaauccccuuaguc

SEQ ID NO: 8579 - RNA, 19 nt, Artificial Sequence
  synthetic
accccaaaauccccuuagu

SEQ ID NO: 8580 - RNA, 19 nt, Artificial Sequence
  synthetic
aaccccaaaauccccuuag

SEQ ID NO: 8581 - RNA, 19 nt, Artificial Sequence
  synthetic
aaaccccaaaauccccuua

SEQ ID NO: 8582 - RNA, 19 nt, Artificial Sequence
  synthetic
caaaccccaaaauccccuu

SEQ ID NO: 8583 - RNA, 19 nt, Artificial Sequence
  synthetic
acaaaccccaaaauccccu

SEQ ID NO: 8584 - RNA, 19 nt, Artificial Sequence
  synthetic
cacaaaccccaaaaucccc

SEQ ID NO: 8585 - RNA, 19 nt, Artificial Sequence
  synthetic
acacaaaccccaaaauccc

SEQ ID NO: 8586 - RNA, 19 nt, Artificial Sequence
  synthetic
aacacaaaccccaaaaucc

SEQ ID NO: 8587 - RNA, 19 nt, Artificial Sequence
  synthetic
gaacacaaaccccaaaauc

SEQ ID NO: 8588 - RNA, 19 nt, Artificial Sequence
  synthetic
ugaacacaaaccccaaaau

SEQ ID NO: 8589 - RNA, 19 nt, Artificial Sequence
  synthetic
gugaacacaaaccccaaaa

SEQ ID NO: 8590 - RNA, 19 nt, Artificial Sequence
  synthetic
cgugaacacaaaccccaaa

SEQ ID NO: 8591 - RNA, 19 nt, Artificial Sequence
  synthetic
gcgugaacacaaaccccaa

SEQ ID NO: 8592 - RNA, 19 nt, Artificial Sequence
  synthetic
agcgugaacacaaacccca

SEQ ID NO: 8593 - RNA, 19 nt, Artificial Sequence
  synthetic
gagcgugaacacaaacccc

SEQ ID NO: 8594 - RNA, 19 nt, Artificial Sequence
  synthetic
ugagcgugaacacaaaccc

SEQ ID NO: 8595 - RNA, 19 nt, Artificial Sequence
  synthetic
gugagcgugaacacaaacc

SEQ ID NO: 8596 - RNA, 19 nt, Artificial Sequence
  synthetic
ggugagcgugaacacaaac

SEQ ID NO: 8597 - RNA, 19 nt, Artificial Sequence
  synthetic
cggugagcgugaacacaaa

SEQ ID NO: 8598 - RNA, 19 nt, Artificial Sequence
  synthetic
acggugagcgugaacacaa

SEQ ID NO: 8599 - RNA, 19 nt, Artificial Sequence
  synthetic
cacggugagcgugaacaca

SEQ ID NO: 8600 - RNA, 19 nt, Artificial Sequence
  synthetic
gcacggugagcgugaacac

SEQ ID NO: 8601 - RNA, 19 nt, Artificial Sequence
  synthetic
ggcacggugagcgugaaca

SEQ ID NO: 8602 - RNA, 19 nt, Artificial Sequence
  synthetic
gggcacggugagcgugaac

SEQ ID NO: 8603 - RNA, 19 nt, Artificial Sequence
  synthetic
ugggcacggugagcgugaa

SEQ ID NO: 8604 - RNA, 19 nt, Artificial Sequence
  synthetic
cugggcacggugagcguga

SEQ ID NO: 8605 - RNA, 19 nt, Artificial Sequence
  synthetic
acugggcacggugagcgug

SEQ ID NO: 8606 - RNA, 19 nt, Artificial Sequence
  synthetic
cacugggcacggugagcgu

SEQ ID NO: 8607 - RNA, 19 nt, Artificial Sequence
  synthetic
ucacugggcacggugagcg

SEQ ID NO: 8608 - RNA, 19 nt, Artificial Sequence
  synthetic
cucacugggcacggugagc

SEQ ID NO: 8609 - RNA, 19 nt, Artificial Sequence
  synthetic
gcucacugggcacggugag

SEQ ID NO: 8610 - RNA, 19 nt, Artificial Sequence
  synthetic
cgcucacugggcacgguga

SEQ ID NO: 8611 - RNA, 19 nt, Artificial Sequence
  synthetic
cuacgcugcaguccucgcu

SEQ ID NO: 8612 - RNA, 19 nt, Artificial Sequence
  synthetic
agcgucuacgcugcagucc

SEQ ID NO: 8613 - RNA, 19 nt, Artificial Sequence
  synthetic
aagcgucuacgcugcaguc

SEQ ID NO: 8614 - RNA, 19 nt, Artificial Sequence
  synthetic
aaagcgucuacgcugcagu

SEQ ID NO: 8615 - RNA, 19 nt, Artificial Sequence
  synthetic
caaagcgucuacgcugcag

SEQ ID NO: 8616 - RNA, 19 nt, Artificial Sequence
  synthetic
acaaagcgucuacgcugca

SEQ ID NO: 8617 - RNA, 19 nt, Artificial Sequence
  synthetic
gacaaagcgucuacgcugc

SEQ ID NO: 8618 - RNA, 19 nt, Artificial Sequence
  synthetic
ggacaaagcgucuacgcug

SEQ ID NO: 8619 - RNA, 19 nt, Artificial Sequence
  synthetic
uggacaaagcgucuacgcu

SEQ ID NO: 8620 - RNA, 19 nt, Artificial Sequence
  synthetic
uuggacaaagcgucuacgc

SEQ ID NO: 8621 - RNA, 19 nt, Artificial Sequence
  synthetic
uuuggacaaagcgucuacg

SEQ ID NO: 8622 - RNA, 19 nt, Artificial Sequence
  synthetic
uuuuggacaaagcgucuac

SEQ ID NO: 8623 - RNA, 19 nt, Artificial Sequence
  synthetic
auuuuggacaaagcgucua

SEQ ID NO: 8624 - RNA, 19 nt, Artificial Sequence
  synthetic
cauuuuggacaaagcgucu

SEQ ID NO: 8625 - RNA, 19 nt, Artificial Sequence
  synthetic
gcauuuuggacaaagcguc

SEQ ID NO: 8626 - RNA, 19 nt, Artificial Sequence
  synthetic
ggcauuuuggacaaagcgu

SEQ ID NO: 8627 - RNA, 19 nt, Artificial Sequence
  synthetic
gggcauuuuggacaaagcg

SEQ ID NO: 8628 - RNA, 19 nt, Artificial Sequence
  synthetic
agggcauuuuggacaaagc

SEQ ID NO: 8629 - RNA, 19 nt, Artificial Sequence
  synthetic
gagggcauuuuggacaaag

SEQ ID NO: 8630 - RNA, 19 nt, Artificial Sequence
  synthetic
ugagggcauuuuggacaaa

SEQ ID NO: 8631 - RNA, 19 nt, Artificial Sequence
  synthetic
uugagggcauuuuggacaa

SEQ ID NO: 8632 - RNA, 19 nt, Artificial Sequence
  synthetic
auugagggcauuuuggaca

SEQ ID NO: 8633 - RNA, 19 nt, Artificial Sequence
  synthetic
cauugagggcauuuuggac

SEQ ID NO: 8634 - RNA, 19 nt, Artificial Sequence
  synthetic
ccauugagggcauuuugga

SEQ ID NO: 8635 - RNA, 19 nt, Artificial Sequence
  synthetic
cccauugagggcauuuugg

SEQ ID NO: 8636 - RNA, 19 nt, Artificial Sequence
  synthetic
ucccauugagggcauuuug

SEQ ID NO: 8637 - RNA, 19 nt, Artificial Sequence
  synthetic
uucccauugagggcauuuu

SEQ ID NO: 8638 - RNA, 19 nt, Artificial Sequence
  synthetic
auucccauugagggcauuu

SEQ ID NO: 8639 - RNA, 19 nt, Artificial Sequence
  synthetic
cauucccauugagggcauu

SEQ ID NO: 8640 - RNA, 19 nt, Artificial Sequence
  synthetic
ccauucccauugagggcau

SEQ ID NO: 8641 - RNA, 19 nt, Artificial Sequence
  synthetic
uccccauucccauugaggg

SEQ ID NO: 8642 - RNA, 19 nt, Artificial Sequence
  synthetic
uguccauguuauuuggauc

SEQ ID NO: 8643 - RNA, 19 nt, Artificial Sequence
  synthetic
uuguccauguuauuuggau

SEQ ID NO: 8644 - RNA, 19 nt, Artificial Sequence
  synthetic
uuuguccauguuauuugga

SEQ ID NO: 8645 - RNA, 19 nt, Artificial Sequence
  synthetic
cuuuguccauguuauuugg

SEQ ID NO: 8646 - RNA, 19 nt, Artificial Sequence
  synthetic
gcuuuguccauguuauuug

SEQ ID NO: 8647 - RNA, 19 nt, Artificial Sequence
  synthetic
ugcuuuguccauguuauuu

SEQ ID NO: 8648 - RNA, 19 nt, Artificial Sequence
  synthetic
cugcuuuguccauguuauu

SEQ ID NO: 8649 - RNA, 19 nt, Artificial Sequence
  synthetic
acugcuuuguccauguuau

SEQ ID NO: 8650 - RNA, 19 nt, Artificial Sequence
  synthetic
aacugcuuuguccauguua

SEQ ID NO: 8651 - RNA, 19 nt, Artificial Sequence
  synthetic
uaacugcuuuguccauguu

SEQ ID NO: 8652 - RNA, 19 nt, Artificial Sequence
  synthetic
uuaacugcuuuguccaugu

SEQ ID NO: 8653 - RNA, 19 nt, Artificial Sequence
  synthetic
uuuaacugcuuuguccaug

SEQ ID NO: 8654 - RNA, 19 nt, Artificial Sequence
  synthetic
guuuaacugcuuuguccau

SEQ ID NO: 8655 - RNA, 19 nt, Artificial Sequence
  synthetic
aguuuaacugcuuugucca

SEQ ID NO: 8656 - RNA, 19 nt, Artificial Sequence
  synthetic
caguuuaacugcuuugucc

SEQ ID NO: 8657 - RNA, 19 nt, Artificial Sequence
  synthetic
acaguuuaacugcuuuguc

SEQ ID NO: 8658 - RNA, 19 nt, Artificial Sequence
  synthetic
uacaguuuaacugcuuugu

SEQ ID NO: 8659 - RNA, 19 nt, Artificial Sequence
  synthetic
auacaguuuaacugcuuug

SEQ ID NO: 8660 - RNA, 19 nt, Artificial Sequence
  synthetic
uauacaguuuaacugcuuu

SEQ ID NO: 8661 - RNA, 19 nt, Artificial Sequence
  synthetic
cuauacaguuuaacugcuu

SEQ ID NO: 8662 - RNA, 19 nt, Artificial Sequence
  synthetic
aucucccucuuaaguuuuc

SEQ ID NO: 8663 - RNA, 19 nt, Artificial Sequence
  synthetic
uuaucucccucuuaaguuu

SEQ ID NO: 8664 - RNA, 19 nt, Artificial Sequence
  synthetic
guuaucucccucuuaaguu

SEQ ID NO: 8665 - RNA, 19 nt, Artificial Sequence
  synthetic
uuggccccauggaauguua

SEQ ID NO: 8666 - RNA, 19 nt, Artificial Sequence
  synthetic
uuucuuuggccccauggaa

SEQ ID NO: 8667 - RNA, 19 nt, Artificial Sequence
  synthetic
auuucuuuggccccaugga

SEQ ID NO: 8668 - RNA, 19 nt, Artificial Sequence
  synthetic
uauuucuuuggccccaugg

SEQ ID NO: 8669 - RNA, 19 nt, Artificial Sequence
  synthetic
cuauuucuuuggccccaug

SEQ ID NO: 8670 - RNA, 19 nt, Artificial Sequence
  synthetic
gcuauuucuuuggccccau

SEQ ID NO: 8671 - RNA, 19 nt, Artificial Sequence
  synthetic
uaacugagugcuauuucuu

SEQ ID NO: 8672 - RNA, 19 nt, Artificial Sequence
  synthetic
caccagcagaauaacugag

SEQ ID NO: 8673 - RNA, 19 nt, Artificial Sequence
  synthetic
gcaccagcagaauaacuga

SEQ ID NO: 8674 - RNA, 19 nt, Artificial Sequence
  synthetic
ugcaccagcagaauaacug

SEQ ID NO: 8675 - RNA, 19 nt, Artificial Sequence
  synthetic
gugcaccagcagaauaacu

SEQ ID NO: 8676 - RNA, 19 nt, Artificial Sequence
  synthetic
agugcaccagcagaauaac

SEQ ID NO: 8677 - RNA, 19 nt, Artificial Sequence
  synthetic
aagugcaccagcagaauaa

SEQ ID NO: 8678 - RNA, 19 nt, Artificial Sequence
  synthetic
caagugcaccagcagaaua

SEQ ID NO: 8679 - RNA, 19 nt, Artificial Sequence
  synthetic
gcaagugcaccagcagaau

SEQ ID NO: 8680 - RNA, 19 nt, Artificial Sequence
  synthetic
ggcaagugcaccagcagaa

SEQ ID NO: 8681 - RNA, 19 nt, Artificial Sequence
  synthetic
uggcaagugcaccagcaga

SEQ ID NO: 8682 - RNA, 19 nt, Artificial Sequence
  synthetic
cuggcaagugcaccagcag

SEQ ID NO: 8683 - RNA, 19 nt, Artificial Sequence
  synthetic
acuggcaagugcaccagca

SEQ ID NO: 8684 - RNA, 19 nt, Artificial Sequence
  synthetic
aacuggcaagugcaccagc

SEQ ID NO: 8685 - RNA, 19 nt, Artificial Sequence
  synthetic
caacuggcaagugcaccag

SEQ ID NO: 8686 - RNA, 19 nt, Artificial Sequence
  synthetic
gcaacuggcaagugcacca

SEQ ID NO: 8687 - RNA, 19 nt, Artificial Sequence
  synthetic
ugcaacuggcaagugcacc

SEQ ID NO: 8688 - RNA, 19 nt, Artificial Sequence
  synthetic
augcaacuggcaagugcac

SEQ ID NO: 8689 - RNA, 19 nt, Artificial Sequence
  synthetic
caugcaacuggcaagugca

SEQ ID NO: 8690 - RNA, 19 nt, Artificial Sequence
  synthetic
ccaugcaacuggcaagugc

SEQ ID NO: 8691 - RNA, 19 nt, Artificial Sequence
  synthetic
cccaugcaacuggcaagug

SEQ ID NO: 8692 - RNA, 19 nt, Artificial Sequence
  synthetic
gcccaugcaacuggcaagu

SEQ ID NO: 8693 - RNA, 19 nt, Artificial Sequence
  synthetic
ggcccaugcaacuggcaag

SEQ ID NO: 8694 - RNA, 19 nt, Artificial Sequence
  synthetic
aggcccaugcaacuggcaa

SEQ ID NO: 8695 - RNA, 19 nt, Artificial Sequence
  synthetic
gaggcccaugcaacuggca

SEQ ID NO: 8696 - RNA, 19 nt, Artificial Sequence
  synthetic
ugaggcccaugcaacuggc

SEQ ID NO: 8697 - RNA, 19 nt, Artificial Sequence
  synthetic
augaggcccaugcaacugg

SEQ ID NO: 8698 - RNA, 19 nt, Artificial Sequence
  synthetic
uaugaggcccaugcaacug

SEQ ID NO: 8699 - RNA, 19 nt, Artificial Sequence
  synthetic
auaugaggcccaugcaacu

SEQ ID NO: 8700 - RNA, 19 nt, Artificial Sequence
  synthetic
uauaugaggcccaugcaac

SEQ ID NO: 8701 - RNA, 19 nt, Artificial Sequence
  synthetic
guauaugaggcccaugcaa

SEQ ID NO: 8702 - RNA, 19 nt, Artificial Sequence
  synthetic
uguauaugaggcccaugca

SEQ ID NO: 8703 - RNA, 19 nt, Artificial Sequence
  synthetic
uuguauaugaggcccaugc

SEQ ID NO: 8704 - RNA, 19 nt, Artificial Sequence
  synthetic
auuguauaugaggcccaug

SEQ ID NO: 8705 - RNA, 19 nt, Artificial Sequence
  synthetic
uauuguauaugaggcccau

SEQ ID NO: 8706 - RNA, 19 nt, Artificial Sequence
  synthetic
cuauuguauaugaggccca

SEQ ID NO: 8707 - RNA, 19 nt, Artificial Sequence
  synthetic
gcccccauccuauuguaua

SEQ ID NO: 8708 - RNA, 19 nt, Artificial Sequence
  synthetic
gccacuucggugguuacag

SEQ ID NO: 8709 - RNA, 19 nt, Artificial Sequence
  synthetic
ccaggccaaaugccacuuc

SEQ ID NO: 8710 - RNA, 19 nt, Artificial Sequence
  synthetic
accaggccaaaugccacuu

SEQ ID NO: 8711 - RNA, 19 nt, Artificial Sequence
  synthetic
uaccaggccaaaugccacu

SEQ ID NO: 8712 - RNA, 19 nt, Artificial Sequence
  synthetic
auaccaggccaaaugccac

SEQ ID NO: 8713 - RNA, 19 nt, Artificial Sequence
  synthetic
cauaccaggccaaaugcca

SEQ ID NO: 8714 - RNA, 19 nt, Artificial Sequence
  synthetic
acauaccaggccaaaugcc

SEQ ID NO: 8715 - RNA, 19 nt, Artificial Sequence
  synthetic
cacauaccaggccaaaugc

SEQ ID NO: 8716 - RNA, 19 nt, Artificial Sequence
  synthetic
gcacauaccaggccaaaug

SEQ ID NO: 8717 - RNA, 19 nt, Artificial Sequence
  synthetic
ugcacauaccaggccaaau

SEQ ID NO: 8718 - RNA, 19 nt, Artificial Sequence
  synthetic
uugcacauaccaggccaaa

SEQ ID NO: 8719 - RNA, 19 nt, Artificial Sequence
  synthetic
guugcacauaccaggccaa

SEQ ID NO: 8720 - RNA, 19 nt, Artificial Sequence
  synthetic
uguugcacauaccaggcca

SEQ ID NO: 8721 - RNA, 19 nt, Artificial Sequence
  synthetic
auguugcacauaccaggcc

SEQ ID NO: 8722 - RNA, 19 nt, Artificial Sequence
  synthetic
cauguugcacauaccaggc

SEQ ID NO: 8723 - RNA, 19 nt, Artificial Sequence
  synthetic
acauguugcacauaccagg

SEQ ID NO: 8724 - RNA, 19 nt, Artificial Sequence
  synthetic
cacauguugcacauaccag

SEQ ID NO: 8725 - RNA, 19 nt, Artificial Sequence
  synthetic
ucacauguugcacauacca

SEQ ID NO: 8726 - RNA, 19 nt, Artificial Sequence
  synthetic
uucacauguugcacauacc

SEQ ID NO: 8727 - RNA, 19 nt, Artificial Sequence
  synthetic
guucacauguugcacauac

SEQ ID NO: 8728 - RNA, 19 nt, Artificial Sequence
  synthetic
uguucacauguugcacaua

SEQ ID NO: 8729 - RNA, 19 nt, Artificial Sequence
  synthetic
cuguucacauguugcacau

SEQ ID NO: 8730 - RNA, 19 nt, Artificial Sequence
  synthetic
ucuguucacauguugcaca

SEQ ID NO: 8731 - RNA, 19 nt, Artificial Sequence
  synthetic
aucuguucacauguugcac

SEQ ID NO: 8732 - RNA, 19 nt, Artificial Sequence
  synthetic
aaucuguucacauguugca

SEQ ID NO: 8733 - RNA, 19 nt, Artificial Sequence
  synthetic
caaucuguucacauguugc

SEQ ID NO: 8734 - RNA, 19 nt, Artificial Sequence
  synthetic
gcaaucuguucacauguug

SEQ ID NO: 8735 - RNA, 19 nt, Artificial Sequence
  synthetic
agcaaucuguucacauguu

SEQ ID NO: 8736 - RNA, 19 nt, Artificial Sequence
  synthetic
cagcaaucuguucacaugu

SEQ ID NO: 8737 - RNA, 19 nt, Artificial Sequence
  synthetic
ucagcaaucuguucacaug

SEQ ID NO: 8738 - RNA, 19 nt, Artificial Sequence
  synthetic
gucagcaaucuguucacau

SEQ ID NO: 8739 - RNA, 19 nt, Artificial Sequence
  synthetic
agucagcaaucuguucaca

SEQ ID NO: 8740 - RNA, 19 nt, Artificial Sequence
  synthetic
gagucagcaaucuguucac

SEQ ID NO: 8741 - RNA, 19 nt, Artificial Sequence
  synthetic
ggagucagcaaucuguuca

SEQ ID NO: 8742 - RNA, 19 nt, Artificial Sequence
  synthetic
gggagucagcaaucuguuc

SEQ ID NO: 8743 - RNA, 19 nt, Artificial Sequence
  synthetic
ugggagucagcaaucuguu

SEQ ID NO: 8744 - RNA, 19 nt, Artificial Sequence
  synthetic
cugggagucagcaaucugu

SEQ ID NO: 8745 - RNA, 19 nt, Artificial Sequence
  synthetic
gcugggagucagcaaucug

SEQ ID NO: 8746 - RNA, 19 nt, Artificial Sequence
  synthetic
ugcugggagucagcaaucu

SEQ ID NO: 8747 - RNA, 19 nt, Artificial Sequence
  synthetic
gugcugggagucagcaauc

SEQ ID NO: 8748 - RNA, 19 nt, Artificial Sequence
  synthetic
ugugcugggagucagcaau

SEQ ID NO: 8749 - RNA, 19 nt, Artificial Sequence
  synthetic
cugugcugggagucagcaa

SEQ ID NO: 8750 - RNA, 19 nt, Artificial Sequence
  synthetic
ccugugcugggagucagca

SEQ ID NO: 8751 - RNA, 19 nt, Artificial Sequence
  synthetic
accugugcugggagucagc

SEQ ID NO: 8752 - RNA, 19 nt, Artificial Sequence
  synthetic
gaccugugcugggagucag

SEQ ID NO: 8753 - RNA, 19 nt, Artificial Sequence
  synthetic
gccaccauuugccuaugag

SEQ ID NO: 8754 - RNA, 19 nt, Artificial Sequence
  synthetic
uugccaccauuugccuaug

SEQ ID NO: 8755 - RNA, 19 nt, Artificial Sequence
  synthetic
guugccaccauuugccuau

SEQ ID NO: 8756 - RNA, 19 nt, Artificial Sequence
  synthetic
uguugccaccauuugccua

SEQ ID NO: 8757 - RNA, 19 nt, Artificial Sequence
  synthetic
uuguugccaccauuugccu

SEQ ID NO: 8758 - RNA, 19 nt, Artificial Sequence
  synthetic
guuguugccaccauuugcc

SEQ ID NO: 8759 - RNA, 19 nt, Artificial Sequence
  synthetic
gguuguugccaccauuugc

SEQ ID NO: 8760 - RNA, 19 nt, Artificial Sequence
  synthetic
ugguuguugccaccauuug

SEQ ID NO: 8761 - RNA, 19 nt, Artificial Sequence
  synthetic
uugguuguugccaccauuu

SEQ ID NO: 8762 - RNA, 19 nt, Artificial Sequence
  synthetic
auugguuguugccaccauu

SEQ ID NO: 8763 - RNA, 19 nt, Artificial Sequence
  synthetic
gauugguuguugccaccau

SEQ ID NO: 8764 - RNA, 19 nt, Artificial Sequence
  synthetic
ggauugguuguugccacca

SEQ ID NO: 8765 - RNA, 19 nt, Artificial Sequence
  synthetic
uggauugguuguugccacc

SEQ ID NO: 8766 - RNA, 19 nt, Artificial Sequence
  synthetic
auggauugguuguugccac

SEQ ID NO: 8767 - RNA, 19 nt, Artificial Sequence
  synthetic
aauggauugguuguugcca

SEQ ID NO: 8768 - RNA, 19 nt, Artificial Sequence
  synthetic
uaauggauugguuguugcc

SEQ ID NO: 8769 - RNA, 19 nt, Artificial Sequence
  synthetic
uuaauggauugguuguugc

SEQ ID NO: 8770 - RNA, 19 nt, Artificial Sequence
  synthetic
auuaauggauugguuguug

SEQ ID NO: 8771 - RNA, 19 nt, Artificial Sequence
  synthetic
uauuaauggauugguuguu

SEQ ID NO: 8772 - RNA, 19 nt, Artificial Sequence
  synthetic
uuauuaauggauugguugu

SEQ ID NO: 8773 - RNA, 19 nt, Artificial Sequence
  synthetic
uuuauuaauggauugguug

SEQ ID NO: 8774 - RNA, 19 nt, Artificial Sequence
  synthetic
uuuuauuaauggauugguu

SEQ ID NO: 8775 - RNA, 19 nt, Artificial Sequence
  synthetic
guuuuauuaauggauuggu

SEQ ID NO: 8776 - RNA, 19 nt, Artificial Sequence
  synthetic
uguuuuauuaauggauugg

SEQ ID NO: 8777 - RNA, 19 nt, Artificial Sequence
  synthetic
auguuuuauuaauggauug

SEQ ID NO: 8778 - RNA, 19 nt, Artificial Sequence
  synthetic
cauguuuuauuaauggauu

SEQ ID NO: 8779 - RNA, 19 nt, Artificial Sequence
  synthetic
ucauguuuuauuaauggau

SEQ ID NO: 8780 - RNA, 19 nt, Artificial Sequence
  synthetic
cucauguuuuauuaaugga

SEQ ID NO: 8781 - RNA, 19 nt, Artificial Sequence
  synthetic
ucucauguuuuauuaaugg

SEQ ID NO: 8782 - RNA, 19 nt, Artificial Sequence
  synthetic
uucucauguuuuauuaaug

SEQ ID NO: 8783 - RNA, 19 nt, Artificial Sequence
  synthetic
guucucauguuuuauuaau

SEQ ID NO: 8784 - RNA, 19 nt, Artificial Sequence
  synthetic
uguucucauguuuuauuaa

SEQ ID NO: 8785 - RNA, 19 nt, Artificial Sequence
  synthetic
cuguucucauguuuuauua

SEQ ID NO: 8786 - RNA, 19 nt, Artificial Sequence
  synthetic
ucuguucucauguuuuauu

SEQ ID NO: 8787 - RNA, 19 nt, Artificial Sequence
  synthetic
uucuguucucauguuuuau

SEQ ID NO: 8788 - RNA, 19 nt, Artificial Sequence
  synthetic
auucuguucucauguuuua

SEQ ID NO: 8789 - RNA, 19 nt, Artificial Sequence
  synthetic
cauucuguucucauguuuu

SEQ ID NO: 8790 - RNA, 19 nt, Artificial Sequence
  synthetic
ccauucuguucucauguuu

SEQ ID NO: 8791 - RNA, 19 nt, Artificial Sequence
  synthetic
accauucuguucucauguu

SEQ ID NO: 8792 - RNA, 19 nt, Artificial Sequence
  synthetic
aaccauucuguucucaugu

SEQ ID NO: 8793 - RNA, 19 nt, Artificial Sequence
  synthetic
aaaccauucuguucucaug

SEQ ID NO: 8794 - RNA, 19 nt, Artificial Sequence
  synthetic
aaaaccauucuguucucau

SEQ ID NO: 8795 - RNA, 19 nt, Artificial Sequence
  synthetic
caaaaccauucuguucuca

SEQ ID NO: 8796 - RNA, 19 nt, Artificial Sequence
  synthetic
ccaaaaccauucuguucuc

SEQ ID NO: 8797 - RNA, 19 nt, Artificial Sequence
  synthetic
gccaaaaccauucuguucu

SEQ ID NO: 8798 - RNA, 19 nt, Artificial Sequence
  synthetic
ggccaaaaccauucuguuc

SEQ ID NO: 8799 - RNA, 19 nt, Artificial Sequence
  synthetic
uggccaaaaccauucuguu

SEQ ID NO: 8800 - RNA, 19 nt, Artificial Sequence
  synthetic
cuggccaaaaccauucugu

SEQ ID NO: 8801 - RNA, 19 nt, Artificial Sequence
  synthetic
gcuggccaaaaccauucug

SEQ ID NO: 8802 - RNA, 19 nt, Artificial Sequence
  synthetic
ugcuggccaaaaccauucu

SEQ ID NO: 8803 - RNA, 19 nt, Artificial Sequence
  synthetic
gugcuggccaaaaccauuc

SEQ ID NO: 8804 - RNA, 19 nt, Artificial Sequence
  synthetic
agugcuggccaaaaccauu

SEQ ID NO: 8805 - RNA, 19 nt, Artificial Sequence
  synthetic
uagugcuggccaaaaccau

SEQ ID NO: 8806 - RNA, 19 nt, Artificial Sequence
  synthetic
guagugcuggccaaaacca

SEQ ID NO: 8807 - RNA, 19 nt, Artificial Sequence
  synthetic
uguagugcuggccaaaacc

SEQ ID NO: 8808 - RNA, 19 nt, Artificial Sequence
  synthetic
cuguagugcuggccaaaac

SEQ ID NO: 8809 - RNA, 19 nt, Artificial Sequence
  synthetic
gcuguagugcuggccaaaa

SEQ ID NO: 8810 - RNA, 19 nt, Artificial Sequence
  synthetic
agcuguagugcuggccaaa

SEQ ID NO: 8811 - RNA, 19 nt, Artificial Sequence
  synthetic
uagcuguagugcuggccaa

SEQ ID NO: 8812 - RNA, 19 nt, Artificial Sequence
  synthetic
uuagcuguagugcuggcca

SEQ ID NO: 8813 - RNA, 19 nt, Artificial Sequence
  synthetic
cuuagcuguagugcuggcc

SEQ ID NO: 8814 - RNA, 19 nt, Artificial Sequence
  synthetic
ccuuagcuguagugcuggc

SEQ ID NO: 8815 - RNA, 19 nt, Artificial Sequence
  synthetic
gccuuagcuguagugcugg

SEQ ID NO: 8816 - RNA, 19 nt, Artificial Sequence
  synthetic
agccuuagcuguagugcug

SEQ ID NO: 8817 - RNA, 19 nt, Artificial Sequence
  synthetic
uagccuuagcuguagugcu

SEQ ID NO: 8818 - RNA, 19 nt, Artificial Sequence
  synthetic
auagccuuagcuguagugc

SEQ ID NO: 8819 - RNA, 19 nt, Artificial Sequence
  synthetic
cauagccuuagcuguagug

SEQ ID NO: 8820 - RNA, 19 nt, Artificial Sequence
  synthetic
ccauagccuuagcuguagu

SEQ ID NO: 8821 - RNA, 19 nt, Artificial Sequence
  synthetic
uccauagccuuagcuguag

SEQ ID NO: 8822 - RNA, 19 nt, Artificial Sequence
  synthetic
cuccauagccuuagcugua

SEQ ID NO: 8823 - RNA, 19 nt, Artificial Sequence
  synthetic
gcuccauagccuuagcugu

SEQ ID NO: 8824 - RNA, 19 nt, Artificial Sequence
  synthetic
ugcuccauagccuuagcug

SEQ ID NO: 8825 - RNA, 19 nt, Artificial Sequence
  synthetic
uugcuccauagccuuagcu

SEQ ID NO: 8826 - RNA, 19 nt, Artificial Sequence
  synthetic
uuugcuccauagccuuagc

SEQ ID NO: 8827 - RNA, 19 nt, Artificial Sequence
  synthetic
auuugcuccauagccuuag

SEQ ID NO: 8828 - RNA, 19 nt, Artificial Sequence
  synthetic
cauuugcuccauagccuua

SEQ ID NO: 8829 - RNA, 19 nt, Artificial Sequence
  synthetic
ccauuugcuccauagccuu

SEQ ID NO: 8830 - RNA, 19 nt, Artificial Sequence
  synthetic
gccauuugcuccauagccu

SEQ ID NO: 8831 - RNA, 19 nt, Artificial Sequence
  synthetic
agccauuugcuccauagcc

SEQ ID NO: 8832 - RNA, 19 nt, Artificial Sequence
  synthetic
cagccauuugcuccauagc

SEQ ID NO: 8833 - RNA, 19 nt, Artificial Sequence
  synthetic
ccagccauuugcuccauag

SEQ ID NO: 8834 - RNA, 19 nt, Artificial Sequence
  synthetic
uccagccauuugcuccaua

SEQ ID NO: 8835 - RNA, 19 nt, Artificial Sequence
  synthetic
auccagccauuugcuccau

SEQ ID NO: 8836 - RNA, 19 nt, Artificial Sequence
  synthetic
gauccagccauuugcucca

SEQ ID NO: 8837 - RNA, 19 nt, Artificial Sequence
  synthetic
cacuugauccagccauuug

SEQ ID NO: 8838 - RNA, 19 nt, Artificial Sequence
  synthetic
ucacuugauccagccauuu

SEQ ID NO: 8839 - RNA, 19 nt, Artificial Sequence
  synthetic
gcucacuugauccagccau

SEQ ID NO: 8840 - RNA, 19 nt, Artificial Sequence
  synthetic
ugcucacuugauccagcca

SEQ ID NO: 8841 - RNA, 19 nt, Artificial Sequence
  synthetic
cugcucacuugauccagcc

SEQ ID NO: 8842 - RNA, 19 nt, Artificial Sequence
  synthetic
ccugcucacuugauccagc

SEQ ID NO: 8843 - RNA, 19 nt, Artificial Sequence
  synthetic
gccugcucacuugauccag

SEQ ID NO: 8844 - RNA, 19 nt, Artificial Sequence
  synthetic
ugccugcucacuugaucca

SEQ ID NO: 8845 - RNA, 19 nt, Artificial Sequence
  synthetic
cugccugcucacuugaucc

SEQ ID NO: 8846 - RNA, 19 nt, Artificial Sequence
  synthetic
gcugccugcucacuugauc

SEQ ID NO: 8847 - RNA, 19 nt, Artificial Sequence
  synthetic
ccgcugccugcucacuuga

SEQ ID NO: 8848 - RNA, 19 nt, Artificial Sequence
  synthetic
uccgcugccugcucacuug

SEQ ID NO: 8849 - RNA, 19 nt, Artificial Sequence
  synthetic
cuccgcugccugcucacuu

SEQ ID NO: 8850 - RNA, 19 nt, Artificial Sequence
  synthetic
ccuccgcugccugcucacu

SEQ ID NO: 8851 - RNA, 19 nt, Artificial Sequence
  synthetic
gccuccgcugccugcucac

SEQ ID NO: 8852 - RNA, 19 nt, Artificial Sequence
  synthetic
ggccuccgcugccugcuca

SEQ ID NO: 8853 - RNA, 19 nt, Artificial Sequence
  synthetic
uggccuccgcugccugcuc

SEQ ID NO: 8854 - RNA, 19 nt, Artificial Sequence
  synthetic
auggccuccgcugccugcu

SEQ ID NO: 8855 - RNA, 19 nt, Artificial Sequence
  synthetic
cauggccuccgcugccugc

SEQ ID NO: 8856 - RNA, 19 nt, Artificial Sequence
  synthetic
ccauggccuccgcugccug

SEQ ID NO: 8857 - RNA, 19 nt, Artificial Sequence
  synthetic
uccauggccuccgcugccu

SEQ ID NO: 8858 - RNA, 19 nt, Artificial Sequence
  synthetic
gccugacuagcaaucucca

SEQ ID NO: 8859 - RNA, 19 nt, Artificial Sequence
  synthetic
gccuggccugacuagcaau

SEQ ID NO: 8860 - RNA, 19 nt, Artificial Sequence
  synthetic
ugccuggccugacuagcaa

SEQ ID NO: 8861 - RNA, 19 nt, Artificial Sequence
  synthetic
gccugcaccauuugccugg

SEQ ID NO: 8862 - RNA, 19 nt, Artificial Sequence
  synthetic
ucauugccugcaccauuug

SEQ ID NO: 8863 - RNA, 19 nt, Artificial Sequence
  synthetic
cucauugccugcaccauuu

SEQ ID NO: 8864 - RNA, 19 nt, Artificial Sequence
  synthetic
gucccaacgguucucauug

SEQ ID NO: 8865 - RNA, 19 nt, Artificial Sequence
  synthetic
cuaggaugagucccaacgg

SEQ ID NO: 8866 - RNA, 19 nt, Artificial Sequence
  synthetic
gcuaggaugagucccaacg

SEQ ID NO: 8867 - RNA, 19 nt, Artificial Sequence
  synthetic
agcuaggaugagucccaac

SEQ ID NO: 8868 - RNA, 19 nt, Artificial Sequence
  synthetic
gagcuaggaugagucccaa

SEQ ID NO: 8869 - RNA, 19 nt, Artificial Sequence
  synthetic
ggagcuaggaugaguccca

SEQ ID NO: 8870 - RNA, 19 nt, Artificial Sequence
  synthetic
uggagcuaggaugaguccc

SEQ ID NO: 8871 - RNA, 19 nt, Artificial Sequence
  synthetic
cuggagcuaggaugagucc

SEQ ID NO: 8872 - RNA, 19 nt, Artificial Sequence
  synthetic
acuggagcuaggaugaguc

SEQ ID NO: 8873 - RNA, 19 nt, Artificial Sequence
  synthetic
uacuggagcuaggaugagu

SEQ ID NO: 8874 - RNA, 19 nt, Artificial Sequence
  synthetic
guacuggagcuaggaugag

SEQ ID NO: 8875 - RNA, 19 nt, Artificial Sequence
  synthetic
aguacuggagcuaggauga

SEQ ID NO: 8876 - RNA, 19 nt, Artificial Sequence
  synthetic
caguacuggagcuaggaug

SEQ ID NO: 8877 - RNA, 19 nt, Artificial Sequence
  synthetic
ccaguacuggagcuaggau

SEQ ID NO: 8878 - RNA, 19 nt, Artificial Sequence
  synthetic
accaguacuggagcuagga

SEQ ID NO: 8879 - RNA, 19 nt, Artificial Sequence
  synthetic
gaccaguacuggagcuagg

SEQ ID NO: 8880 - RNA, 19 nt, Artificial Sequence
  synthetic
agaccaguacuggagcuag

SEQ ID NO: 8881 - RNA, 19 nt, Artificial Sequence
  synthetic
uagaccaguacuggagcua

SEQ ID NO: 8882 - RNA, 19 nt, Artificial Sequence
  synthetic
uuagaccaguacuggagcu

SEQ ID NO: 8883 - RNA, 19 nt, Artificial Sequence
  synthetic
cuuagaccaguacuggagc

SEQ ID NO: 8884 - RNA, 19 nt, Artificial Sequence
  synthetic
ucuuagaccaguacuggag

SEQ ID NO: 8885 - RNA, 19 nt, Artificial Sequence
  synthetic
cucuuagaccaguacugga

SEQ ID NO: 8886 - RNA, 19 nt, Artificial Sequence
  synthetic
ucucuuagaccaguacugg

SEQ ID NO: 8887 - RNA, 19 nt, Artificial Sequence
  synthetic
aucucuuagaccaguacug

SEQ ID NO: 8888 - RNA, 19 nt, Artificial Sequence
  synthetic
caucucuuagaccaguacu

SEQ ID NO: 8889 - RNA, 19 nt, Artificial Sequence
  synthetic
ucaucucuuagaccaguac

SEQ ID NO: 8890 - RNA, 19 nt, Artificial Sequence
  synthetic
aucaucucuuagaccagua

SEQ ID NO: 8891 - RNA, 19 nt, Artificial Sequence
  synthetic
gaucaucucuuagaccagu

SEQ ID NO: 8892 - RNA, 19 nt, Artificial Sequence
  synthetic
agaucaucucuuagaccag

SEQ ID NO: 8893 - RNA, 19 nt, Artificial Sequence
  synthetic
aagaucaucucuuagacca

SEQ ID NO: 8894 - RNA, 19 nt, Artificial Sequence
  synthetic
gaagaucaucucuuagacc

SEQ ID NO: 8895 - RNA, 19 nt, Artificial Sequence
  synthetic
agaagaucaucucuuagac

SEQ ID NO: 8896 - RNA, 19 nt, Artificial Sequence
  synthetic
aagaagaucaucucuuaga

SEQ ID NO: 8897 - RNA, 19 nt, Artificial Sequence
  synthetic
caagaagaucaucucuuag

SEQ ID NO: 8898 - RNA, 19 nt, Artificial Sequence
  synthetic
ucaagaagaucaucucuua

SEQ ID NO: 8899 - RNA, 19 nt, Artificial Sequence
  synthetic
uucaagaagaucaucucuu

SEQ ID NO: 8900 - RNA, 19 nt, Artificial Sequence
  synthetic
uuucaagaagaucaucucu

SEQ ID NO: 8901 - RNA, 19 nt, Artificial Sequence
  synthetic
uuuucaagaagaucaucuc

SEQ ID NO: 8902 - RNA, 19 nt, Artificial Sequence
  synthetic
auuuucaagaagaucaucu

SEQ ID NO: 8903 - RNA, 19 nt, Artificial Sequence
  synthetic
aauuuucaagaagaucauc

SEQ ID NO: 8904 - RNA, 19 nt, Artificial Sequence
  synthetic
aaauuuucaagaagaucau

SEQ ID NO: 8905 - RNA, 19 nt, Artificial Sequence
  synthetic
caaauuuucaagaagauca

SEQ ID NO: 8906 - RNA, 19 nt, Artificial Sequence
  synthetic
gcaaauuuucaagaagauc

SEQ ID NO: 8907 - RNA, 19 nt, Artificial Sequence
  synthetic
ugcaaauuuucaagaagau

SEQ ID NO: 8908 - RNA, 19 nt, Artificial Sequence
  synthetic
cugcaaauuuucaagaaga

SEQ ID NO: 8909 - RNA, 19 nt, Artificial Sequence
  synthetic
ucugcaaauuuucaagaag

SEQ ID NO: 8910 - RNA, 19 nt, Artificial Sequence
  synthetic
gucugcaaauuuucaagaa

SEQ ID NO: 8911 - RNA, 19 nt, Artificial Sequence
  synthetic
ggucugcaaauuuucaaga

SEQ ID NO: 8912 - RNA, 19 nt, Artificial Sequence
  synthetic
aggucugcaaauuuucaag

SEQ ID NO: 8913 - RNA, 19 nt, Artificial Sequence
  synthetic
uaggucugcaaauuuucaa

SEQ ID NO: 8914 - RNA, 19 nt, Artificial Sequence
  synthetic
auaggucugcaaauuuuca

SEQ ID NO: 8915 - RNA, 19 nt, Artificial Sequence
  synthetic
gauaggucugcaaauuuuc

SEQ ID NO: 8916 - RNA, 19 nt, Artificial Sequence
  synthetic
ugauaggucugcaaauuuu

SEQ ID NO: 8917 - RNA, 19 nt, Artificial Sequence
  synthetic
cugauaggucugcaaauuu

SEQ ID NO: 8918 - RNA, 19 nt, Artificial Sequence
  synthetic
ucugauaggucugcaaauu

SEQ ID NO: 8919 - RNA, 19 nt, Artificial Sequence
  synthetic
uucugauaggucugcaaau

SEQ ID NO: 8920 - RNA, 19 nt, Artificial Sequence
  synthetic
uuucugauaggucugcaaa

SEQ ID NO: 8921 - RNA, 19 nt, Artificial Sequence
  synthetic
guuucugauaggucugcaa

SEQ ID NO: 8922 - RNA, 19 nt, Artificial Sequence
  synthetic
cguuucugauaggucugca

SEQ ID NO: 8923 - RNA, 19 nt, Artificial Sequence
  synthetic
ucguuucugauaggucugc

SEQ ID NO: 8924 - RNA, 19 nt, Artificial Sequence
  synthetic
uucguuucugauaggucug

SEQ ID NO: 8925 - RNA, 19 nt, Artificial Sequence
  synthetic
auucguuucugauaggucu

SEQ ID NO: 8926 - RNA, 19 nt, Artificial Sequence
  synthetic
cauucguuucugauagguc

SEQ ID NO: 8927 - RNA, 19 nt, Artificial Sequence
  synthetic
ccauucguuucugauaggu

SEQ ID NO: 8928 - RNA, 19 nt, Artificial Sequence
  synthetic
cccauucguuucugauagg

SEQ ID NO: 8929 - RNA, 19 nt, Artificial Sequence
  synthetic
ccccauucguuucugauag

SEQ ID NO: 8930 - RNA, 19 nt, Artificial Sequence
  synthetic
cccccauucguuucugaua

SEQ ID NO: 8931 - RNA, 19 nt, Artificial Sequence
  synthetic
acccccauucguuucugau

SEQ ID NO: 8932 - RNA, 19 nt, Artificial Sequence
  synthetic
cacccccauucguuucuga

SEQ ID NO: 8933 - RNA, 19 nt, Artificial Sequence
  synthetic
gcacccccauucguuucug

SEQ ID NO: 8934 - RNA, 19 nt, Artificial Sequence
  synthetic
ugcacccccauucguuucu

SEQ ID NO: 8935 - RNA, 19 nt, Artificial Sequence
  synthetic
cugcacccccauucguuuc

SEQ ID NO: 8936 - RNA, 19 nt, Artificial Sequence
  synthetic
ucugcacccccauucguuu

SEQ ID NO: 8937 - RNA, 19 nt, Artificial Sequence
  synthetic
aucugcacccccauucguu

SEQ ID NO: 8938 - RNA, 19 nt, Artificial Sequence
  synthetic
caucugcacccccauucgu

SEQ ID NO: 8939 - RNA, 19 nt, Artificial Sequence
  synthetic
gcaucugcacccccauucg

SEQ ID NO: 8940 - RNA, 19 nt, Artificial Sequence
  synthetic
ugcaucugcacccccauuc

SEQ ID NO: 8941 - RNA, 19 nt, Artificial Sequence
  synthetic
uugcaucugcacccccauu

SEQ ID NO: 8942 - RNA, 19 nt, Artificial Sequence
  synthetic
guugcaucugcacccccau

SEQ ID NO: 8943 - RNA, 19 nt, Artificial Sequence
  synthetic
cguugcaucugcaccccca

SEQ ID NO: 8944 - RNA, 19 nt, Artificial Sequence
  synthetic
ucguugcaucugcaccccc

SEQ ID NO: 8945 - RNA, 19 nt, Artificial Sequence
  synthetic
aucguugcaucugcacccc

SEQ ID NO: 8946 - RNA, 19 nt, Artificial Sequence
  synthetic
aaucguugcaucugcaccc

SEQ ID NO: 8947 - RNA, 19 nt, Artificial Sequence
  synthetic
gaaucguugcaucugcacc

SEQ ID NO: 8948 - RNA, 19 nt, Artificial Sequence
  synthetic
ugaaucguugcaucugcac

SEQ ID NO: 8949 - RNA, 19 nt, Artificial Sequence
  synthetic
uugaaucguugcaucugca

SEQ ID NO: 8950 - RNA, 19 nt, Artificial Sequence
  synthetic
caacaagcgggucacuuga

SEQ ID NO: 8951 - RNA, 19 nt, Artificial Sequence
  synthetic
caaugauacucgcagcaac

SEQ ID NO: 8952 - RNA, 19 nt, Artificial Sequence
  synthetic
agaucccaaugauacucgc

SEQ ID NO: 8953 - RNA, 19 nt, Artificial Sequence
  synthetic
aagaucccaaugauacucg

SEQ ID NO: 8954 - RNA, 19 nt, Artificial Sequence
  synthetic
caagaucccaaugauacuc

SEQ ID NO: 8955 - RNA, 19 nt, Artificial Sequence
  synthetic
gcaagaucccaaugauacu

SEQ ID NO: 8956 - RNA, 19 nt, Artificial Sequence
  synthetic
ugcaagaucccaaugauac

SEQ ID NO: 8957 - RNA, 19 nt, Artificial Sequence
  synthetic
gugcaagaucccaaugaua

SEQ ID NO: 8958 - RNA, 19 nt, Artificial Sequence
  synthetic
agugcaagaucccaaugau

SEQ ID NO: 8959 - RNA, 19 nt, Artificial Sequence
  synthetic
aagugcaagaucccaauga

SEQ ID NO: 8960 - RNA, 19 nt, Artificial Sequence
  synthetic
caagugcaagaucccaaug

SEQ ID NO: 8961 - RNA, 19 nt, Artificial Sequence
  synthetic
ucaagugcaagaucccaau

SEQ ID NO: 8962 - RNA, 19 nt, Artificial Sequence
  synthetic
aucaagugcaagaucccaa

SEQ ID NO: 8963 - RNA, 19 nt, Artificial Sequence
  synthetic
uaucaagugcaagauccca

SEQ ID NO: 8964 - RNA, 19 nt, Artificial Sequence
  synthetic
auaucaagugcaagauccc

SEQ ID NO: 8965 - RNA, 19 nt, Artificial Sequence
  synthetic
gacgaucaagaauccacaa

SEQ ID NO: 8966 - RNA, 19 nt, Artificial Sequence
  synthetic
agacgaucaagaauccaca

SEQ ID NO: 8967 - RNA, 19 nt, Artificial Sequence
  synthetic
aagacgaucaagaauccac

SEQ ID NO: 8968 - RNA, 19 nt, Artificial Sequence
  synthetic
aaagacgaucaagaaucca

SEQ ID NO: 8969 - RNA, 19 nt, Artificial Sequence
  synthetic
aaaagacgaucaagaaucc

SEQ ID NO: 8970 - RNA, 19 nt, Artificial Sequence
  synthetic
aaaaagacgaucaagaauc

SEQ ID NO: 8971 - RNA, 19 nt, Artificial Sequence
  synthetic
aaaaaagacgaucaagaau

SEQ ID NO: 8972 - RNA, 19 nt, Artificial Sequence
  synthetic
aaaaaaagacgaucaagaa

SEQ ID NO: 8973 - RNA, 19 nt, Artificial Sequence
  synthetic
gaaaaaaagacgaucaaga

SEQ ID NO: 8974 - RNA, 19 nt, Artificial Sequence
  synthetic
ugaaaaaaagacgaucaag

SEQ ID NO: 8975 - RNA, 19 nt, Artificial Sequence
  synthetic
uugaaaaaaagacgaucaa

SEQ ID NO: 8976 - RNA, 19 nt, Artificial Sequence
  synthetic
uuugaaaaaaagacgauca

SEQ ID NO: 8977 - RNA, 19 nt, Artificial Sequence
  synthetic
auuugaaaaaaagacgauc

SEQ ID NO: 8978 - RNA, 19 nt, Artificial Sequence
  synthetic
cauuugaaaaaaagacgau

SEQ ID NO: 8979 - RNA, 19 nt, Artificial Sequence
  synthetic
gcauuugaaaaaaagacga

SEQ ID NO: 8980 - RNA, 19 nt, Artificial Sequence
  synthetic
agaugcauuugaaaaaaag

SEQ ID NO: 8981 - RNA, 19 nt, Artificial Sequence
  synthetic
cguguuugaagagucgaua

SEQ ID NO: 8982 - RNA, 19 nt, Artificial Sequence
  synthetic
aaggcccucuuuucaggcc

SEQ ID NO: 8983 - RNA, 19 nt, Artificial Sequence
  synthetic
guacuccuuccguagaagg

SEQ ID NO: 8984 - RNA, 19 nt, Artificial Sequence
  synthetic
gguacuccuuccguagaag

SEQ ID NO: 8985 - RNA, 19 nt, Artificial Sequence
  synthetic
agguacuccuuccguagaa

SEQ ID NO: 8986 - RNA, 19 nt, Artificial Sequence
  synthetic
cagguacuccuuccguaga

SEQ ID NO: 8987 - RNA, 19 nt, Artificial Sequence
  synthetic
ucagguacuccuuccguag

SEQ ID NO: 8988 - RNA, 19 nt, Artificial Sequence
  synthetic
cucagguacuccuuccgua

SEQ ID NO: 8989 - RNA, 19 nt, Artificial Sequence
  synthetic
acucagguacuccuuccgu

SEQ ID NO: 8990 - RNA, 19 nt, Artificial Sequence
  synthetic
gacucagguacuccuuccg

SEQ ID NO: 8991 - RNA, 19 nt, Artificial Sequence
  synthetic
agacucagguacuccuucc

SEQ ID NO: 8992 - RNA, 19 nt, Artificial Sequence
  synthetic
uagacucagguacuccuuc

SEQ ID NO: 8993 - RNA, 19 nt, Artificial Sequence
  synthetic
auagacucagguacuccuu

SEQ ID NO: 8994 - RNA, 19 nt, Artificial Sequence
  synthetic
cauagacucagguacuccu

SEQ ID NO: 8995 - RNA, 19 nt, Artificial Sequence
  synthetic
ucauagacucagguacucc

SEQ ID NO: 8996 - RNA, 19 nt, Artificial Sequence
  synthetic
cucauagacucagguacuc

SEQ ID NO: 8997 - RNA, 19 nt, Artificial Sequence
  synthetic
ccucauagacucagguacu

SEQ ID NO: 8998 - RNA, 19 nt, Artificial Sequence
  synthetic
cccucauagacucagguac

SEQ ID NO: 8999 - RNA, 19 nt, Artificial Sequence
  synthetic
ucccucauagacucaggua

SEQ ID NO: 9000 - RNA, 19 nt, Artificial Sequence
  synthetic
uucccucauagacucaggu

SEQ ID NO: 9001 - RNA, 19 nt, Artificial Sequence
  synthetic
cuucccucauagacucagg

SEQ ID NO: 9002 - RNA, 19 nt, Artificial Sequence
  synthetic
ucuucccucauagacucag

SEQ ID NO: 9003 - RNA, 19 nt, Artificial Sequence
  synthetic
uucuucccucauagacuca

SEQ ID NO: 9004 - RNA, 19 nt, Artificial Sequence
  synthetic
auucuucccucauagacuc

SEQ ID NO: 9005 - RNA, 19 nt, Artificial Sequence
  synthetic
uauucuucccucauagacu

SEQ ID NO: 9006 - RNA, 19 nt, Artificial Sequence
  synthetic
auauucuucccucauagac

SEQ ID NO: 9007 - RNA, 19 nt, Artificial Sequence
  synthetic
gauauucuucccucauaga

SEQ ID NO: 9008 - RNA, 19 nt, Artificial Sequence
  synthetic
cgauauucuucccucauag

SEQ ID NO: 9009 - RNA, 19 nt, Artificial Sequence
  synthetic
ucgauauucuucccucaua

SEQ ID NO: 9010 - RNA, 19 nt, Artificial Sequence
  synthetic
uucgauauucuucccucau

SEQ ID NO: 9011 - RNA, 19 nt, Artificial Sequence
  synthetic
uuucgauauucuucccuca

SEQ ID NO: 9012 - RNA, 19 nt, Artificial Sequence
  synthetic
cuuucgauauucuucccuc

SEQ ID NO: 9013 - RNA, 19 nt, Artificial Sequence
  synthetic
ccuuucgauauucuucccu

SEQ ID NO: 9014 - RNA, 19 nt, Artificial Sequence
  synthetic
uccuuucgauauucuuccc

SEQ ID NO: 9015 - RNA, 19 nt, Artificial Sequence
  synthetic
uuccuuucgauauucuucc

SEQ ID NO: 9016 - RNA, 19 nt, Artificial Sequence
  synthetic
guuccuuucgauauucuuc

SEQ ID NO: 9017 - RNA, 19 nt, Artificial Sequence
  synthetic
uguuccuuucgauauucuu

SEQ ID NO: 9018 - RNA, 19 nt, Artificial Sequence
  synthetic
cuguuccuuucgauauucu

SEQ ID NO: 9019 - RNA, 19 nt, Artificial Sequence
  synthetic
gcuguuccuuucgauauuc

SEQ ID NO: 9020 - RNA, 19 nt, Artificial Sequence
  synthetic
ugcuguuccuuucgauauu

SEQ ID NO: 9021 - RNA, 19 nt, Artificial Sequence
  synthetic
cugcuguuccuuucgauau

SEQ ID NO: 9022 - RNA, 19 nt, Artificial Sequence
  synthetic
ucugcuguuccuuucgaua

SEQ ID NO: 9023 - RNA, 19 nt, Artificial Sequence
  synthetic
uucugcuguuccuuucgau

SEQ ID NO: 9024 - RNA, 19 nt, Artificial Sequence
  synthetic
auucugcuguuccuuucga

SEQ ID NO: 9025 - RNA, 19 nt, Artificial Sequence
  synthetic
cauucugcuguuccuuucg

SEQ ID NO: 9026 - RNA, 19 nt, Artificial Sequence
  synthetic
gcauucugcuguuccuuuc

SEQ ID NO: 9027 - RNA, 19 nt, Artificial Sequence
  synthetic
agcauucugcuguuccuuu

SEQ ID NO: 9028 - RNA, 19 nt, Artificial Sequence
  synthetic
cagcauucugcuguuccuu

SEQ ID NO: 9029 - RNA, 19 nt, Artificial Sequence
  synthetic
acagcauucugcuguuccu

SEQ ID NO: 9030 - RNA, 19 nt, Artificial Sequence
  synthetic
cacagcauucugcuguucc

SEQ ID NO: 9031 - RNA, 19 nt, Artificial Sequence
  synthetic
ccacagcauucugcuguuc

SEQ ID NO: 9032 - RNA, 19 nt, Artificial Sequence
  synthetic
uccacagcauucugcuguu

SEQ ID NO: 9033 - RNA, 19 nt, Artificial Sequence
  synthetic
auccacagcauucugcugu

SEQ ID NO: 9034 - RNA, 19 nt, Artificial Sequence
  synthetic
cauccacagcauucugcug

SEQ ID NO: 9035 - RNA, 19 nt, Artificial Sequence
  synthetic
gcauccacagcauucugcu

SEQ ID NO: 9036 - RNA, 19 nt, Artificial Sequence
  synthetic
agcauccacagcauucugc

SEQ ID NO: 9037 - RNA, 19 nt, Artificial Sequence
  synthetic
cagcauccacagcauucug

SEQ ID NO: 9038 - RNA, 19 nt, Artificial Sequence
  synthetic
ucagcauccacagcauucu

SEQ ID NO: 9039 - RNA, 19 nt, Artificial Sequence
  synthetic
gucagcauccacagcauuc

SEQ ID NO: 9040 - RNA, 19 nt, Artificial Sequence
  synthetic
cgucagcauccacagcauu

SEQ ID NO: 9041 - RNA, 19 nt, Artificial Sequence
  synthetic
ucgucagcauccacagcau

SEQ ID NO: 9042 - RNA, 19 nt, Artificial Sequence
  synthetic
gucgucagcauccacagca

SEQ ID NO: 9043 - RNA, 19 nt, Artificial Sequence
  synthetic
ugucgucagcauccacagc

SEQ ID NO: 9044 - RNA, 19 nt, Artificial Sequence
  synthetic
cugucgucagcauccacag

SEQ ID NO: 9045 - RNA, 19 nt, Artificial Sequence
  synthetic
acugucgucagcauccaca

SEQ ID NO: 9046 - RNA, 19 nt, Artificial Sequence
  synthetic
gacugucgucagcauccac

SEQ ID NO: 9047 - RNA, 19 nt, Artificial Sequence
  synthetic
ugacugucgucagcaucca

SEQ ID NO: 9048 - RNA, 19 nt, Artificial Sequence
  synthetic
augacugucgucagcaucc

SEQ ID NO: 9049 - RNA, 19 nt, Artificial Sequence
  synthetic
aaugacugucgucagcauc

SEQ ID NO: 9050 - RNA, 19 nt, Artificial Sequence
  synthetic
aaaugacugucgucagcau

SEQ ID NO: 9051 - RNA, 19 nt, Artificial Sequence
  synthetic
aaaaugacugucgucagca

SEQ ID NO: 9052 - RNA, 19 nt, Artificial Sequence
  synthetic
caaaaugacugucgucagc

SEQ ID NO: 9053 - RNA, 19 nt, Artificial Sequence
  synthetic
acaaaaugacugucgucag

SEQ ID NO: 9054 - RNA, 19 nt, Artificial Sequence
  synthetic
gacaaaaugacugucguca

SEQ ID NO: 9055 - RNA, 19 nt, Artificial Sequence
  synthetic
ugacaaaaugacugucguc

SEQ ID NO: 9056 - RNA, 19 nt, Artificial Sequence
  synthetic
cugacaaaaugacugucgu

SEQ ID NO: 9057 - RNA, 19 nt, Artificial Sequence
  synthetic
gcugacaaaaugacugucg

SEQ ID NO: 9058 - RNA, 19 nt, Artificial Sequence
  synthetic
ugcugacaaaaugacuguc

SEQ ID NO: 9059 - RNA, 19 nt, Artificial Sequence
  synthetic
augcugacaaaaugacugu

SEQ ID NO: 9060 - RNA, 19 nt, Artificial Sequence
  synthetic
uaugcugacaaaaugacug

SEQ ID NO: 9061 - RNA, 19 nt, Artificial Sequence
  synthetic
cuaugcugacaaaaugacu

SEQ ID NO: 9062 - RNA, 19 nt, Artificial Sequence
  synthetic
ucuaugcugacaaaaugac

SEQ ID NO: 9063 - RNA, 19 nt, Artificial Sequence
  synthetic
cucuaugcugacaaaauga

SEQ ID NO: 9064 - RNA, 19 nt, Artificial Sequence
  synthetic
uuuuuuacuccagcucuau

SEQ ID NO: 9065 - RNA, 19 nt, Artificial Sequence
  synthetic
aagguaguuuuuuacucca

SEQ ID NO: 9066 - RNA, 19 nt, Artificial Sequence
  synthetic
caagguaguuuuuuacucc

SEQ ID NO: 9067 - RNA, 19 nt, Artificial Sequence
  synthetic
acaagguaguuuuuuacuc

SEQ ID NO: 9068 - RNA, 19 nt, Artificial Sequence
  synthetic
aacaagguaguuuuuuacu

SEQ ID NO: 9069 - RNA, 19 nt, Artificial Sequence
  synthetic
aaacaagguaguuuuuuac

SEQ ID NO: 9070 - RNA, 19 nt, Artificial Sequence
  synthetic
gaaacaagguaguuuuuua

SEQ ID NO: 9071 - RNA, 19 nt, Artificial Sequence
  synthetic
agaaacaagguaguuuuuu

SEQ ID NO: 9072 - RNA, 19 nt, Artificial Sequence
  synthetic
uagaaacaagguaguuuuu

SEQ ID NO: 9073 - RNA, 19 nt, Artificial Sequence
  synthetic
aauggcuaaagacaagacc

SEQ ID NO: 9074 - RNA, 19 nt, Artificial Sequence
  synthetic
uucugcuggugcacuugcc

SEQ ID NO: 9075 - RNA, 19 nt, Artificial Sequence
  synthetic
uucuugaaaauuugcagac

SEQ ID NO: 9076 - RNA, 19 nt, Artificial Sequence
  synthetic
uauugaaagaugagccuuc

SEQ ID NO: 9077 - RNA, 19 nt, Artificial Sequence
  synthetic
uagauauugaaagaugagc

SEQ ID NO: 9078 - RNA, 19 nt, Artificial Sequence
  synthetic
augcuguggaugcugacga

SEQ ID NO: 9079 - RNA, 19 nt, Artificial Sequence
  synthetic
ucucuaucguuccaucagg

SEQ ID NO: 9080 - RNA, 19 nt, Artificial Sequence
  synthetic
aagaugucuuugcugggaa

SEQ ID NO: 9081 - RNA, 23 nt, Artificial Sequence
  synthetic
gggggugcagaugcaacgauuca

SEQ ID NO: 9082 - RNA, 23 nt, Artificial Sequence
  synthetic
aacauggacaaagcaguuaaacu

SEQ ID NO: 9083 - RNA, 23 nt, Artificial Sequence
  synthetic
agggaagaauaucgaaaggaaca

SEQ ID NO: 9084 - RNA, 23 nt, Artificial Sequence
  synthetic
ugguggcaacaaccaauccauua

SEQ ID NO: 9085 - RNA, 23 nt, Artificial Sequence
  synthetic
cagagacuugaagaugucuuugc

SEQ ID NO: 9086 - RNA, 23 nt, Artificial Sequence
  synthetic
uuguggauucuugaucgucuuuu

SEQ ID NO: 9087 - RNA, 23 nt, Artificial Sequence
  synthetic
uugaucgucuuuuuuucaaaugc

SEQ ID NO: 9088 - RNA, 23 nt, Artificial Sequence
  synthetic
uugcaugggccucauauacaaua

SEQ ID NO: 9089 - DNA, 21 bp, Artificial Sequence
  synthetic
gggugcagaugcaacgauutt

SEQ ID NO: 9090 - DNA, 21 bp, Artificial Sequence
  synthetic
cauggacaaagcaguuaaatt

SEQ ID NO: 9091 - DNA, 21 bp, Artificial Sequence
  synthetic
ggaagaauaucgaaaggaatt

SEQ ID NO: 9092 - DNA, 21 bp, Artificial Sequence
  synthetic
guggcaacaaccaauccautt

SEQ ID NO: 9093 - DNA, 21 bp, Artificial Sequence
  synthetic
gagacuugaagaugucuuutt

SEQ ID NO: 9094 - DNA, 21 bp, Artificial Sequence
  synthetic
guggauucuugaucgucuutt

SEQ ID NO: 9095 - DNA, 21 bp, Artificial Sequence
  synthetic
gaucgucuuuuuuucaaautt

SEQ ID NO: 9096 - DNA, 21 bp, Artificial Sequence
  synthetic
gcaugggccucauauacaatt

SEQ ID NO: 9097 - DNA, 21 bp, Artificial Sequence
  synthetic
aaucguugcaucugcaccctt

SEQ ID NO: 9098 - DNA, 21 bp, Artificial Sequence
  synthetic
uuuaacugcuuuguccaugtt

SEQ ID NO: 9099 - DNA, 21 bp, Artificial Sequence
  synthetic
uuccuuucgauauucuucctt

SEQ ID NO: 9100 - DNA, 21 bp, Artificial Sequence
  synthetic
auggauugguuguugccactt

SEQ ID NO: 9101 - DNA, 21 bp, Artificial Sequence
  synthetic
aaagacaucuucaagucuctt

SEQ ID NO: 9102 - DNA, 21 bp, Artificial Sequence
  synthetic
aagacgaucaagaauccactt

SEQ ID NO: 9103 - DNA, 21 bp, Artificial Sequence
  synthetic
auuugaaaaaaagacgauctt

SEQ ID NO: 9104 - DNA, 21 bp, Artificial Sequence
  synthetic
uuguauaugaggcccaugctt

SEQ ID NO: 9105 - DNA, 21 bp, Artificial Sequence
  synthetic
  misc_feature (1)..(1): 5'-3 attached deoxy abasic moiety
  misc_feature (4)..(4): 2'-deoxy-2'-fluoro
  misc_feature (6)..(6): 2'-deoxy-2'-fluoro
  misc_feature (10)..(10): 2'-deoxy-2'-fluoro
  misc_feature (12)..(12): 2'-deoxy-2'-fluoro
  misc_feature (15)..(15): 2'-deoxy-2'-fluoro
  misc_feature (18)..(19): 2'-deoxy-2'-fluoro
  misc_feature (21)..(21): 3'-3 attached deoxy abasic moiety
gggugcagaugcaacgauutt

SEQ ID NO: 9106 - DNA, 21 bp, Artificial Sequence
  synthetic
  misc_feature (1)..(1): 5'-3 attached deoxy abasic moiety
  misc_feature (1)..(1): 2'-deoxy-2'-fluoro
  misc_feature (3)..(3): 2'-deoxy-2'-fluoro
  misc_feature (7)..(7): 2'-deoxy-2'-fluoro
  misc_feature (12)..(12): 2'-deoxy-2'-fluoro
  misc_feature (15)..(16): 2'-deoxy-2'-fluoro
  misc_feature (21)..(21): 3'-3 attached deoxy abasic moiety
cauggacaaagcaguuaaatt

SEQ ID NO: 9107 - DNA, 21 bp, Artificial Sequence
  synthetic
  misc_feature (1)..(1): 5'-3 attached deoxy abasic moiety
  misc_feature (8)..(8): 2'-deoxy-2'-fluoro
  misc_feature (10)..(11): 2'-deoxy-2'-fluoro
  misc_feature (21)..(21): 3'-3 attached deoxy abasic moiety
ggaagaauaucgaaaggaatt

SEQ ID NO: 9108 - DNA, 21 bp, Artificial Sequence
  synthetic
  misc_feature (1)..(1): 5'-3 attached deoxy abasic moiety
  misc_feature (2)..(2): 2'-deoxy-2'-fluoro
  misc_feature (5)..(5): 2'-deoxy-2'-fluoro
  misc_feature (8)..(8): 2'-deoxy-2'-fluoro
  misc_feature (11)..(12): 2'-deoxy-2'-fluoro
  misc_feature (15)..(17): 2'-deoxy-2'-fluoro
  misc_feature (19)..(19): 2'-deoxy-2'-fluoro
  misc_feature (21)..(21): 3'-3 attached deoxy abasic moiety
guggcaacaaccaauccautt

SEQ ID NO: 9109 - DNA, 21 bp, Artificial Sequence
  synthetic
  misc_feature (1)..(1): 5'-3 attached deoxy abasic moiety
  misc_feature (5)..(7): 2'-deoxy-2'-fluoro
  misc_feature (13)..(13): 2'-deoxy-2'-fluoro
  misc_feature (15)..(19): 2'-deoxy-2'-fluoro
  misc_feature (21)..(21): 3'-3 attached deoxy abasic moiety
gagacuugaagaugucuuutt

SEQ ID NO: 9110 - DNA, 21 bp, Artificial Sequence
  synthetic
  misc_feature (1)..(1): 5'-3 attached deoxy abasic moiety
  misc_feature (2)..(2): 2'-deoxy-2'-fluoro
  misc_feature (6)..(10): 2'-deoxy-2'-fluoro
  misc_feature (13)..(14): 2'-deoxy-2'-fluoro
  misc_feature (16)..(19): 2'-deoxy-2'-fluoro
  misc_feature (21)..(21): 3'-3 attached deoxy abasic moiety
guggauucuugaucgucuutt

SEQ ID NO: 9111 - DNA, 21 bp, Artificial Sequence
  synthetic
  misc_feature (1)..(1): 5'-3 attached deoxy abasic moiety
  misc_feature (3)..(4): 2'-deoxy-2'-fluoro
  misc_feature (6)..(15): 2'-deoxy-2'-fluoro
  misc_feature (19)..(19): 2'-deoxy-2'-fluoro
  misc_feature (21)..(21): 3'-3 attached deoxy abasic moiety
gaucgucuuuuuuucaaautt

SEQ ID NO: 9112 - DNA, 21 bp, Artificial Sequence
  synthetic
  misc_feature (1)..(1): 5'-3 attached deoxy abasic moiety
  misc_feature (2)..(2): 2'-deoxy-2'-fluoro
  misc_feature (4)..(4): 2'-deoxy-2'-fluoro
  misc_feature (8)..(11): 2'-deoxy-2'-fluoro
  misc_feature (13)..(13): 2'-deoxy-2'-fluoro
  misc_feature (15)..(15): 2'-deoxy-2'-fluoro
  misc_feature (17)..(17): 2'-deoxy-2'-fluoro
  misc_feature (21)..(21): 3'-3 attached deoxy abasic moiety
gcaugggccucauauacaatt

SEQ ID NO: 9113 - DNA, 21 bp, Artificial Sequence
  synthetic
  misc_feature (3)..(4): 2'-deoxy-2'-fluoro
  misc_feature (6)..(7): 2'-deoxy-2'-fluoro
  misc_feature (9)..(9): 2'-deoxy-2'-fluoro
  misc_feature (11)..(13): 2'-deoxy-2'-fluoro
  misc_feature (15)..(15): 2'-deoxy-2'-fluoro
  misc_feature (17)..(19): 2'-deoxy-2'-fluoro
  misc_feature (20)..(21): phosphorothioate linkage
aaucguugcaucugcaccctt

SEQ ID NO: 9114 - DNA, 21 bp, Artificial Sequence
  synthetic
  misc_feature (1)..(3): 2'-deoxy-2'-fluoro
  misc_feature (6)..(7): 2'-deoxy-2'-fluoro
  misc_feature (9)..(12): 2'-deoxy-2'-fluoro
  misc_feature (14)..(16): 2'-deoxy-2'-fluoro
  misc_feature (18)..(18): 2'-deoxy-2'-fluoro
  misc_feature (20)..(21): phosphorothioate linkage
uuuaacugcuuuguccaugtt

SEQ ID NO: 9115 - DNA, 21 bp, Artificial Sequence
  synthetic
  misc_feature (1)..(8): 2'-deoxy-2'-fluoro
  misc_feature (11)..(11): 2'-deoxy-2'-fluoro
  misc_feature (13)..(19): 2'-deoxy-2'-fluoro
  misc_feature (20)..(21): phosphorothioate linkage
uuccuuucgauauucuucctt

SEQ ID NO: 9116 - DNA, 21 bp, Artificial Sequence
  synthetic
  misc_feature (2)..(2): 2'-deoxy-2'-fluoro
  misc_feature (6)..(7): 2'-deoxy-2'-fluoro
  misc_feature (10)..(11): 2'-deoxy-2'-fluoro
  misc_feature (13)..(14): 2'-deoxy-2'-fluoro
  misc_feature (16)..(17): 2'-deoxy-2'-fluoro
  misc_feature (19)..(19): 2'-deoxy-2'-fluoro
  misc_feature (20)..(21): phosphorothioate linkage
auggauugguuguugccactt

SEQ ID NO: 9117 - DNA, 21 bp, Artificial Sequence
  synthetic
  misc_feature (6)..(6): 2'-deoxy-2'-fluoro
  misc_feature (8)..(12): 2'-deoxy-2'-fluoro
  misc_feature (16)..(19): 2'-deoxy-2'-fluoro
  misc_feature (20)..(21): phosphorothioate linkage
aaagacaucuucaagucuctt

SEQ ID NO: 9118 - DNA, 21 bp, Artificial Sequence
  synthetic
  misc_feature (5)..(5): 2'-deoxy-2'-fluoro
  misc_feature (8)..(9): 2'-deoxy-2'-fluoro
  misc_feature (15)..(17): 2'-deoxy-2'-fluoro
  misc_feature (19)..(19): 2'-deoxy-2'-fluoro
  misc_feature (20)..(21): phosphorothioate linkage
aagacgaucaagaauccactt

SEQ ID NO: 9119 - DNA, 21 bp, Artificial Sequence
  synthetic
  misc_feature (2)..(4): 2'-deoxy-2'-fluoro
  misc_feature (15)..(15): 2'-deoxy-2'-fluoro
  misc_feature (18)..(19): 2'-deoxy-2'-fluoro
  misc_feature (20)..(21): phosphorothioate linkage
auuugaaaaaaagacgauctt

SEQ ID NO: 9120 - DNA, 21 bp, Artificial Sequence
  synthetic
  misc_feature (1)..(2): 2'-deoxy-2'-fluoro
  misc_feature (4)..(4): 2'-deoxy-2'-fluoro
  misc_feature (6)..(6): 2'-deoxy-2'-fluoro
  misc_feature (8)..(8): 2'-deoxy-2'-fluoro
  misc_feature (13)..(15): 2'-deoxy-2'-fluoro
  misc_feature (17)..(17): 2'-deoxy-2'-fluoro
  misc_feature (19)..(19): 2'-deoxy-2'-fluoro
  misc_feature (20)..(21): phosphorothioate linkage
uuguauaugaggcccaugctt

SEQ ID NO: 9121 - DNA, 21 bp, Artificial Sequence
  synthetic
  misc_feature (1)..(1): 5'-3 attached deoxy abasic moiety
  misc_feature (1)..(3): deoxy-Guanosine
  misc_feature (4)..(4): 2'-deoxy-2'-fluoro
  misc_feature (5)..(5): deoxy-Guanosine
  misc_feature (6)..(6): 2'-deoxy-2'-fluoro
  misc_feature (7)..(7): deoxy-Adenosine
  misc_feature (8)..(8): deoxy-Guanosine
  misc_feature (9)..(9): deoxy-Adenosine
  misc_feature (10)..(10): 2'-deoxy-2'-fluoro
  misc_feature (11)..(11): deoxy-Guanosine
  misc_feature (12)..(12): 2'-deoxy-2'-fluoro
  misc_feature (13)..(14): deoxy-Adenosine
  misc_feature (15)..(15): 2'-deoxy-2'-fluoro
  misc_feature (16)..(16): deoxy-Guanosine
  misc_feature (17)..(17): deoxy-Adenosine
  misc_feature (18)..(19): 2'-deoxy-2'-fluoro
  misc_feature (21)..(21): 3'-3 attached deoxy abasic moiety
gggugcagaugcaacgauutt

SEQ ID NO: 9122 - DNA, 21 bp, Artificial Sequence
  synthetic
  misc_feature (1)..(1): 5'-3 attached deoxy abasic moiety
  misc_feature (1)..(1): 2'-deoxy-2'-fluoro
  misc_feature (2)..(2): deoxy-Adenosine
  misc_feature (3)..(3): 2'-deoxy-2'-fluoro
  misc_feature (4)..(5): deoxy-Guanosine
  misc_feature (6)..(6): deoxy-Adenosine
  misc_feature (7)..(7): 2'-deoxy-2'-fluoro
  misc_feature (8)..(10): deoxy-Adenosine
  misc_feature (11)..(11): deoxy-Guanosine
  misc_feature (12)..(12): 2'-deoxy-2'-fluoro
  misc_feature (13)..(13): deoxy-Adenosine
  misc_feature (14)..(14): deoxy-Guanosine
  misc_feature (15)..(16): 2'-deoxy-2'-fluoro
  misc_feature (17)..(19): deoxy-Adenosine
  misc_feature (21)..(21): 3'-3 attached deoxy abasic moiety
cauggacaaagcaguuaaatt

SEQ ID NO: 9123 - DNA, 21 bp, Artificial Sequence
  synthetic
  misc_feature (1)..(1): 5'-3 attached deoxy abasic moiety
  misc_feature (1)..(2): deoxy-Guanosine
  misc_feature (3)..(4): deoxy-Adenosine
  misc_feature (5)..(5): deoxy-Guanosine
  misc_feature (6)..(7): deoxy-Adenosine
  misc_feature (8)..(8): 2'-deoxy-2'-fluoro
  misc_feature (9)..(9): deoxy-Adenosine
  misc_feature (10)..(11): 2'-deoxy-2'-fluoro
  misc_feature (12)..(12): deoxy-Guanosine
  misc_feature (13)..(15): deoxy-Adenosine
  misc_feature (16)..(17): deoxy-Guanosine
  misc_feature (18)..(19): deoxy-Adenosine
  misc_feature (21)..(21): 3'-3 attached deoxy abasic moiety
ggaagaauaucgaaaggaatt

SEQ ID NO: 9124 - DNA, 21 bp, Artificial Sequence
  synthetic
  misc_feature (1)..(1): 5'-3 attached deoxy abasic moiety
  misc_feature (1)..(1): deoxy-Guanosine
  misc_feature (2)..(2): 2'-deoxy-2'-fluoro
  misc_feature (3)..(4): deoxy-Guanosine
  misc_feature (5)..(5): 2'-deoxy-2'-fluoro
  misc_feature (6)..(7): deoxy-Adenosine
  misc_feature (8)..(8): 2'-deoxy-2'-fluoro
  misc_feature (9)..(10): deoxy-Adenosine
  misc_feature (11)..(12): 2'-deoxy-2'-fluoro
  misc_feature (13)..(14): deoxy-Adenosine
  misc_feature (15)..(17): 2'-deoxy-2'-fluoro
  misc_feature (18)..(18): deoxy-Adenosine
  misc_feature (19)..(19): 2'-deoxy-2'-fluoro
  misc_feature (21)..(21): 3'-3 attached deoxy abasic moiety
guggcaacaaccaauccautt

SEQ ID NO: 9125 - DNA, 21 bp, Artificial Sequence
  synthetic
  misc_feature (1)..(1): 5'-3 attached deoxy abasic moiety
  misc_feature (1)..(1): deoxy-Guanosine
  misc_feature (2)..(2): deoxy-Adenosine
  misc_feature (3)..(3): deoxy-Guanosine
  misc_feature (4)..(4): deoxy-Adenosine
  misc_feature (5)..(7): 2'-deoxy-2'-fluoro
  misc_feature (8)..(8): deoxy-Guanosine
  misc_feature (9)..(10): deoxy-Adenosine
  misc_feature (11)..(11): deoxy-Guanosine
  misc_feature (12)..(12): deoxy-Adenosine
  misc_feature (13)..(13): 2'-deoxy-2'-fluoro
  misc_feature (14)..(14): deoxy-Guanosine
  misc_feature (15)..(19): 2'-deoxy-2'-fluoro
  misc_feature (21)..(21): 3'-3 attached deoxy abasic moiety
gagacuugaagaugucuuutt

SEQ ID NO: 9126 - DNA, 21 bp, Artificial Sequence
  synthetic
  misc_feature (1)..(1): 5'-3 attached deoxy abasic moiety
  misc_feature (1)..(1): deoxy-Guanosine
  misc_feature (2)..(2): 2'-deoxy-2'-fluoro
  misc_feature (3)..(4): deoxy-Guanosine
  misc_feature (5)..(5): deoxy-Adenosine
  misc_feature (6)..(10): 2'-deoxy-2'-fluoro
  misc_feature (11)..(11): deoxy-Guanosine
  misc_feature (12)..(12): deoxy-Adenosine
  misc_feature (13)..(14): 2'-deoxy-2'-fluoro
  misc_feature (15)..(15): deoxy-Guanosine
  misc_feature (16)..(19): 2'-deoxy-2'-fluoro
  misc_feature (21)..(21): 3'-3 attached deoxy abasic moiety
guggauucuugaucgucuutt

SEQ ID NO: 9127 - DNA, 21 bp, Artificial Sequence
  synthetic
  misc_feature (1)..(1): 5'-3 attached deoxy abasic moiety
  misc_feature (1)..(1): deoxy-Guanosine
  misc_feature (2)..(2): deoxy-Adenosine
  misc_feature (3)..(4): 2'-deoxy-2'-fluoro
  misc_feature (5)..(5): deoxy-Guanosine
  misc_feature (6)..(15): 2'-deoxy-2'-fluoro
  misc_feature (16)..(18): deoxy-Adenosine
  misc_feature (19)..(19): 2'-deoxy-2'-fluoro
  misc_feature (21)..(21): 3'-3 attached deoxy abasic moiety
gaucgucuuuuuuucaaautt

SEQ ID NO: 9128 - DNA, 21 bp, Artificial Sequence
  synthetic
  misc_feature (1)..(1): 5'-3 attached deoxy abasic moiety
  misc_feature (1)..(1): deoxy-Guanosine
  misc_feature (2)..(2): 2'-deoxy-2'-fluoro
  misc_feature (3)..(3): deoxy-Adenosine
  misc_feature (4)..(4): 2'-deoxy-2'-fluoro
  misc_feature (5)..(7): deoxy-Guanosine
  misc_feature (8)..(11): 2'-deoxy-2'-fluoro
  misc_feature (12)..(12): deoxy-Adenosine
  misc_feature (13)..(13): 2'-deoxy-2'-fluoro
  misc_feature (14)..(14): deoxy-Adenosine
  misc_feature (15)..(15): 2'-deoxy-2'-fluoro
  misc_feature (16)..(16): deoxy-Adenosine
  misc_feature (17)..(17): 2'-deoxy-2'-fluoro
  misc_feature (18)..(19): deoxy-Adenosine
  misc_feature (21)..(21): 3'-3 attached deoxy abasic moiety
gcaugggccucauauacaatt

SEQ ID NO: 9129 - DNA, 21 bp, Artificial Sequence
  synthetic
  misc_feature (1)..(2): deoxy-Adenosine
  misc_feature (3)..(4): 2'-deoxy-2'-fluoro
  misc_feature (5)..(5): deoxy-Guanosine
  misc_feature (6)..(7): 2'-deoxy-2'-fluoro
  misc_feature (8)..(8): deoxy-Guanosine
  misc_feature (9)..(9): 2'-deoxy-2'-fluoro
  misc_feature (10)..(10): deoxy-Adenosine
  misc_feature (11)..(13): 2'-deoxy-2'-fluoro
  misc_feature (14)..(14): deoxy-Guanosine
  misc_feature (15)..(15): 2'-deoxy-2'-fluoro
  misc_feature (16)..(16): deoxy-Adenosine
  misc_feature (17)..(19): 2'-deoxy-2'-fluoro
  misc_feature (20)..(21): phosphorothioate linkage
aaucguugcaucugcaccctt

SEQ ID NO: 9130 - DNA, 21 bp, Artificial Sequence
  synthetic
  misc_feature (1)..(3): 2'-deoxy-2'-fluoro
  misc_feature (4)..(5): deoxy-Adenosine
  misc_feature (6)..(7): 2'-deoxy-2'-fluoro
  misc_feature (8)..(8): deoxy-Guanosine
  misc_feature (9)..(12): 2'-deoxy-2'-fluoro
  misc_feature (13)..(13): deoxy-Guanosine
  misc_feature (14)..(16): 2'-deoxy-2'-fluoro
  misc_feature (17)..(17): deoxy-Adenosine
  misc_feature (18)..(18): 2'-deoxy-2'-fluoro
  misc_feature (19)..(19): deoxy-Guanosine
  misc_feature (20)..(21): phosphorothioate linkage
uuuaacugcuuuguccaugtt

SEQ ID NO: 9131 - DNA, 21 bp, Artificial Sequence
  synthetic
  misc_feature (1)..(8): 2'-deoxy-2'-fluoro
  misc_feature (9)..(9): deoxy-Guanosine
  misc_feature (10)..(10): deoxy-Adenosine
  misc_feature (11)..(11): 2'-deoxy-2'-fluoro
  misc_feature (12)..(12): deoxy-Adenosine
  misc_feature (13)..(19): 2'-deoxy-2'-fluoro
  misc_feature (20)..(21): phosphorothioate linkage
uuccuuucgauauucuucctt

SEQ ID NO: 9132 - DNA, 21 bp, Artificial Sequence
  synthetic
  misc_feature (1)..(1): deoxy-Adenosine
  misc_feature (2)..(2): 2'-deoxy-2'-fluoro
  misc_feature (3)..(4): deoxy-Guanosine
  misc_feature (5)..(5): deoxy-Adenosine
  misc_feature (6)..(7): 2'-deoxy-2'-fluoro
  misc_feature (8)..(9): deoxy-Guanosine
  misc_feature (10)..(11): 2'-deoxy-2'-fluoro
  misc_feature (12)..(12): deoxy-Guanosine
  misc_feature (13)..(14): 2'-deoxy-2'-fluoro
  misc_feature (15)..(15): deoxy-Guanosine
  misc_feature (16)..(17): 2'-deoxy-2'-fluoro
  misc_feature (18)..(18): deoxy-Adenosine
  misc_feature (19)..(19): 2'-deoxy-2'-fluoro
  misc_feature (20)..(21): phosphorothioate
auggauugguuguugccactt

SEQ ID NO: 9133 - DNA, 21 bp, Artificial Sequence
  synthetic
  misc_feature (1)..(3): deoxy-Adenosine
  misc_feature (4)..(4): deoxy-Guanosine
  misc_feature (5)..(5): deoxy-Adenosine
  misc_feature (6)..(6): 2'-deoxy-2'-fluoro
  misc_feature (7)..(7): deoxy-Adenosine
  misc_feature (8)..(12): 2'-deoxy-2'-fluoro
  misc_feature (13)..(14): deoxy-Adenosine
  misc_feature (15)..(15): deoxy-Guanosine
  misc_feature (16)..(19): 2'-deoxy-2'-fluoro
  misc_feature (20)..(21): phosphorothioate linkage
aaagacaucuucaagucuctt

SEQ ID NO: 9134 - DNA, 21 bp, Artificial Sequence
  synthetic
  misc_feature (1)..(2): deoxy-Adenosine
  misc_feature (3)..(3): deoxy-Guanosine
  misc_feature (4)..(4): deoxy-Adenosine
  misc_feature (5)..(5): 2'-deoxy-2'-fluoro
  misc_feature (6)..(6): deoxy-Guanosine
  misc_feature (7)..(7): deoxy-Adenosine
  misc_feature (8)..(9): 2'-deoxy-2'-fluoro
  misc_feature (10)..(11): deoxy-Adenosine
  misc_feature (12)..(12): deoxy-Guanosine
  misc_feature (13)..(14): deoxy-Adenosine
  misc_feature (15)..(17): 2'-deoxy-2'-fluoro
  misc_feature (18)..(18): deoxy-Adenosine
  misc_feature (19)..(19): 2'-deoxy-2'-fluoro
  misc_feature (20)..(21): phosphorothioate linkage
aagacgaucaagaauccactt

SEQ ID NO: 9135 - DNA, 21 bp, Artificial Sequence
  synthetic
  misc_feature (1)..(1): deoxy-Adenosine
  misc_feature (2)..(4): 2'-deoxy-2'-fluoro
  misc_feature (5)..(5): deoxy-Guanosine
  misc_feature (6)..(12): deoxy-Adenosine
  misc_feature (13)..(13): deoxy-Guanosine
  misc_feature (14)..(14): deoxy-Adenosine
  misc_feature (15)..(15): 2'-deoxy-2'-fluoro
  misc_feature (16)..(16): deoxy-Guanosine
  misc_feature (17)..(17): deoxy-Adenosine
  misc_feature (18)..(19): 2'-deoxy-2'-fluoro
  misc_feature (20)..(21): phosphorothioate linkage
auuugaaaaaaagacgauctt

SEQ ID NO: 9136 - DNA, 21 bp, Artificial Sequence
  synthetic
  misc_feature (1)..(2): 2'-deoxy-2'-fluoro
  misc_feature (3)..(3): deoxy-Guanosine
  misc_feature (4)..(4): 2'-deoxy-2'-fluoro
  misc_feature (5)..(5): deoxy-Adenosine
  misc_feature (6)..(6): 2'-deoxy-2'-fluoro
  misc_feature (7)..(7): deoxy-Adenosine
  misc_feature (8)..(8): 2'-deoxy-2'-fluoro
  misc_feature (9)..(9): deoxy-Guanosine
  misc_feature (10)..(10): deoxy-Adenosine
  misc_feature (11)..(12): deoxy-Guanosine
  misc_feature (13)..(15): 2'-deoxy-2'-fluoro
  misc_feature (16)..(16): deoxy- Adenosine
  misc_feature (17)..(17): 2'-deoxy-2'-fluoro
  misc_feature (18)..(18): deoxy-Guanosine
  misc_feature (19)..(19): 2'-deoxy-2'-fluoro
  misc_feature (20)..(21): phosphorothioate linkage
  misc_feature (119)..(19): 2'-deoxy-2'-fluoro
uuguauaugaggcccaugctt

SEQ ID NO: 9137 - DNA, 21 bp, Artificial Sequence
  synthetic
  misc_feature (1)..(1): 5'-3 attached deoxy abasic moiety
  misc_feature (1)..(3): 2'-O-methyl Guanosine
  misc_feature (4)..(4): 2'-deoxy-2'-fluoro
  misc_feature (5)..(5): 2'-O-methyl Guanosine
  misc_feature (6)..(6): 2'-deoxy-2'-fluoro
  misc_feature (7)..(7): 2'-O-methyl Adenosine
  misc_feature (8)..(8): 2'-O-methyl Guanosine
  misc_feature (9)..(9): 2'-O-methyl Adenosine
  misc_feature (10)..(10): 2'-deoxy-2'-fluoro
  misc_feature (11)..(11): 2'-O-methyl Guanosine
  misc_feature (12)..(12): 2'-deoxy-2'-fluoro
  misc_feature (13)..(14): 2'-O-methyl Adenosine
  misc_feature (15)..(15): 2'-deoxy-2'-fluoro
  misc_feature (16)..(16): 2'-O-methyl Guanosine
  misc_feature (17)..(17): 2'-O-methyl Adenosine
  misc_feature (18)..(19): 2'-deoxy-2'-fluoro
  misc_feature (21)..(21): 3'-3 attached deoxy abasic moiety
gggugcagaugcaacgauutt

SEQ ID NO: 9138 - DNA, 21 bp, Artificial Sequence
  synthetic
  misc_feature (1)..(1): 5'-3 attached deoxy abasic moiety
  misc_feature (1)..(1): 2'-deoxy-2'-fluoro
  misc_feature (2)..(2): 2'-O-methyl Adenosine
  misc_feature (3)..(3): 2'-deoxy-2'-fluoro
  misc_feature (4)..(5): 2'-O-methyl Guanosine
  misc_feature (6)..(6): 2'-O-methyl Adenosine
  misc_feature (7)..(7): 2'-deoxy-2'-fluoro
  misc_feature (8)..(10): 2'-O-methyl Adenosine
  misc_feature (11)..(11): 2'-O-methyl Guanosine
  misc_feature (12)..(12): 2'-deoxy-2'-fluoro
  misc_feature (13)..(13): 2'-O-methyl Adenosine
  misc_feature (14)..(14): 2'-O-methyl Guanosine
  misc_feature (15)..(16): 2'-deoxy-2'-fluoro
  misc_feature (17)..(19): 2'-O-methyl Adenosine
  misc_feature (21)..(21): 3'-3 attached deoxy abasic moiety
cauggacaaagcaguuaaatt

SEQ ID NO: 9139 - DNA, 21 bp, Artificial Sequence
  synthetic
  misc_feature (1)..(1): 5'-3 attached deoxy abasic moiety
  misc_feature (1)..(2): 2'-O-methyl Guanosine
  misc_feature (3)..(4): 2'-O-methyl Adenosine
  misc_feature (5)..(5): 2'-O-methyl Guanosine
  misc_feature (6)..(7): 2'-O-methyl Adenosine
  misc_feature (8)..(8): 2'-deoxy-2'-fluoro
  misc_feature (9)..(9): 2'-O-methyl Adenosine
  misc_feature (10)..(11): 2'-deoxy-2'-fluoro
  misc_feature (12)..(12): 2'-O-methyl Guanosine
  misc_feature (13)..(15): 2'-O-methyl Adenosine
  misc_feature (16)..(17): 2'-O-methyl Guanosine
  misc_feature (18)..(19): 2'-O-methyl Adenosine
  misc_feature (21)..(21): 3'-3 attached deoxy abasic moiety
ggaagaauaucgaaaggaatt

SEQ ID NO: 9140 - DNA, 21 bp, Artificial Sequence
  synthetic
  misc_feature (1)..(1): 5'-3 attached deoxy abasic moiety
  misc_feature (1)..(1): 2'-O-methyl Guanosine
  misc_feature (2)..(2): 2'-deoxy-2'-fluoro
  misc_feature (3)..(4): 2'-O-methyl Guanosine
  misc_feature (5)..(5): 2'-deoxy-2'-fluoro
  misc_feature (6)..(7): 2'-O-methyl Adenosine
  misc_feature (8)..(8): 2'-deoxy-2'-fluoro
  misc_feature (9)..(10): 2'-O-methyl Adenosine
  misc_feature (11)..(12): 2'-deoxy-2'-fluoro
  misc_feature (13)..(14): 2'-O-methyl Adenosine
  misc_feature (15)..(17): 2'-deoxy-2'-fluoro
  misc_feature (18)..(18): 2'-O-methyl Adenosine
  misc_feature (19)..(19): 2'-deoxy-2'-fluoro
  misc_feature (21)..(21): 3'-3 attached deoxy abasic moiety
guggcaacaaccaauccautt

SEQ ID NO: 9141 - DNA, 21 bp, Artificial Sequence
  synthetic
  misc_feature (1)..(1): 5'-3 attached deoxy abasic moiety
  misc_feature (1)..(1): 2'-O-methyl Guanosine
  misc_feature (2)..(2): 2'-O-methyl Adenosine
  misc_feature (3)..(3): 2'-O-methyl Guanosine
  misc_feature (4)..(4): 2'-O-methyl Adenosine
  misc_feature (5)..(7): 2'-deoxy-2'-fluoro
  misc_feature (8)..(8): 2'-O-methyl Guanosine
  misc_feature (9)..(10): 2'-O-methyl Adenosine
  misc_feature (11)..(11): 2'-O-methyl Guanosine
  misc_feature (12)..(12): 2'-O-methyl Adenosine
  misc_feature (13)..(13): 2'-deoxy-2'-fluoro
  misc_feature (14)..(14): 2'-O-methyl Guanosine
  misc_feature (15)..(19): 2'-deoxy-2'-fluoro
  misc_feature (21)..(21): 3'-3 attached deoxy abasic moiety
gagacuugaagaugucuuutt

SEQ ID NO: 9142 - DNA, 21 bp, Artificial Sequence
  synthetic
  misc_feature (1)..(1): 5'-3 attached deoxy abasic moiety
  misc_feature (1)..(1): 2'-O-methyl Guanosine
  misc_feature (2)..(2): 2'-deoxy-2'-fluoro
  misc_feature (3)..(4): 2'-O-methyl Guanosine
  misc_feature (5)..(5): 2'-O-methyl Adenosine
  misc_feature (6)..(10): 2'-deoxy-2'-fluoro
  misc_feature (11)..(11): 2'-O-methyl Guanosine
  misc_feature (12)..(12): 2'-O-methyl Adenosine
  misc_feature (13)..(14): 2'-deoxy-2'-fluoro
  misc_feature (15)..(15): 2'-O-methyl Guanosine
  misc_feature (16)..(19): 2'-deoxy-2'-fluoro
  misc_feature (21)..(21): 3'-3 attached deoxy abasic moiety
guggauucuugaucgucuutt

SEQ ID NO: 9143 - DNA, 21 bp, Artificial Sequence
  synthetic
  misc_feature (1)..(1): 5'-3 attached deoxy abasic moiety
  misc_feature (1)..(1): 2'-O-methyl Guanosine
  misc_feature (2)..(2): 2'-O-methyl Adenosine
  misc_feature (3)..(4): 2'-deoxy-2'-fluoro
  misc_feature (5)..(5): 2'-O-methyl Guanosine
  misc_feature (6)..(15): 2'-deoxy-2'-fluoro
  misc_feature (16)..(18): 2'-O-methyl Adenosine
  misc_feature (19)..(19): 2'-deoxy-2'-fluoro
  misc_feature (21)..(21): 3'-3 attached deoxy abasic moiety
gaucgucuuuuuuucaaautt

SEQ ID NO: 9144 - DNA, 21 bp, Artificial Sequence
  synthetic
  misc_feature (1)..(1): 5'-3 attached deoxy abasic moiety
  misc_feature (1)..(1): 2'-O-methyl Guanosine
  misc_feature (2)..(2): 2'-deoxy-2'-fluoro
  misc_feature (3)..(3): 2'-O-methyl Adenosine
  misc_feature (4)..(4): 2'-deoxy-2'-fluoro
  misc_feature (5)..(7): 2'-O-methyl Guanosine
  misc_feature (8)..(11): 2'-deoxy-2'-fluoro
  misc_feature (12)..(12): 2'-O-methyl Adenosine
  misc_feature (13)..(13): 2'-deoxy-2'-fluoro
  misc_feature (14)..(14): 2'-O-methyl Adenosine
  misc_feature (15)..(15): 2'-deoxy-2'-fluoro
  misc_feature (16)..(16): 2'-O-methyl Adenosine
  misc_feature (17)..(17): 2'-deoxy-2'-fluoro
  misc_feature (18)..(19): 2'-O-methyl Adenosine
  misc_feature (21)..(21): 3'-3 attached deoxy abasic moiety
gcaugggccucauauacaatt

SEQ ID NO: 9145 - DNA, 21 bp, Artificial Sequence
  synthetic
  misc_feature (1)..(2): 2'-O-methyl Adenosine
  misc_feature (3)..(4): 2'-deoxy-2'-fluoro
  misc_feature (5)..(5): 2'-O-methyl Guanosine
  misc_feature (6)..(7): 2'-deoxy-2'-fluoro
  misc_feature (8)..(8): 2'-O-methyl Guanosine
  misc_feature (9)..(9): 2'-deoxy-2'-fluoro
  misc_feature (10)..(10): 2'-O-methyl Adenosine
  misc_feature (11)..(13): 2'-deoxy-2'-fluoro
  misc_feature (14)..(14): 2'-O-methyl Guanosine
  misc_feature (15)..(15): 2'-deoxy-2'-fluoro
  misc_feature (16)..(16): 2'-O-methyl Adenosine
  misc_feature (17)..(19): 2'-deoxy-2'-fluoro
  misc_feature (20)..(21): phosphorothioate linkage
aaucguugcaucugcaccctt

SEQ ID NO: 9146 - DNA, 21 bp, Artificial Sequence
  synthetic
  misc_feature (1)..(3): 2'-deoxy-2'-fluoro
  misc_feature (4)..(5): 2'-O-methyl Adenosine
  misc_feature (6)..(7): 2'-deoxy-2'-fluoro
  misc_feature (8)..(8): 2'-O-methyl Guanosine
  misc_feature (9)..(12): 2'-deoxy-2'-fluoro
  misc_feature (13)..(13): 2'-O-methyl Guanosine
  misc_feature (14)..(16): 2'-deoxy-2'-fluoro
  misc_feature (17)..(17): 2'-O-methyl Adenosine
  misc_feature (18)..(18): 2'-deoxy-2'-fluoro
  misc_feature (19)..(19): 2'-O-methyl Guanosine
  misc_feature (20)..(21): phosphorothioate linkage
uuuaacugcuuuguccaugtt

SEQ ID NO: 9147 - DNA, 21 bp, Artificial Sequence
  synthetic
  misc_feature (1)..(8): 2'-deoxy-2'-fluoro
  misc_feature (9)..(9): 2'-O-methyl Guanosine
  misc_feature (10)..(10): 2'-O-methyl Adenosine
  misc_feature (11)..(11): 2'-deoxy-2'-fluoro
  misc_feature (12)..(12): 2'-O-methyl Adenosine
  misc_feature (13)..(19): 2'-deoxy-2'-fluoro
  misc_feature (20)..(21): phosphorothioate linkage
uuccuuucgauauucuucctt

SEQ ID NO: 9148 - DNA, 21 bp, Artificial Sequence
  synthetic
  misc_feature (1)..(1): 2'-O-methyl Adenosine
  misc_feature (2)..(2): 2'-deoxy-2'-fluoro
  misc_feature (3)..(4): 2'-O-methyl Guanosine
  misc_feature (5)..(5): 2'-O-methyl Adenosine
  misc_feature (6)..(7): 2'-deoxy-2'-fluoro
  misc_feature (8)..(9): 2-O-methyl Guanosine
  misc_feature (10)..(11): 2'-deoxy-2'-fluoro
  misc_feature (12)..(12): 2'-O-methyl Guanosine
  misc_feature (13)..(14): 2'-deoxy-2'-fluoro
  misc_feature (15)..(15): 2'-O-methyl Guanosine
  misc_feature (16)..(17): 2'-deoxy-2'-fluoro
  misc_feature (18)..(18): 2'-O-methyl Adenosine
  misc_feature (19)..(19): 2'-deoxy-2'-fluoro
  misc_feature (20)..(21): phosphorothioate linkage
auggauugguuguugccactt

SEQ ID NO: 9149 - DNA, 21 bp, Artificial Sequence
  synthetic
  misc_feature (1)..(3): 2'-O-methyl Adenosine
  misc_feature (4)..(4): 2'-O-methyl Guanosine
  misc_feature (5)..(5): 2'-O-methyl Adenosine
  misc_feature (6)..(6): 2'-deoxy-2'-fluoro
  misc_feature (7)..(7): 2'-O-methyl Adenosine
  misc_feature (8)..(12): 2'-deoxy-2'-fluoro
  misc_feature (13)..(14): 2'-O-methyl Adenosine
  misc_feature (15)..(15): 2'-O-methyl Guanosine
  misc_feature (16)..(19): 2'-deoxy-2'-fluoro
  misc_feature (20)..(21): phosphorothioate linkage
aaagacaucuucaagucuctt

SEQ ID NO: 9150 - DNA, 21 bp, Artificial Sequence
  synthetic
  misc_feature (1)..(2): 2'-O-methyl Adenosine
  misc_feature (3)..(3): 2'-O-methyl Guanosine
  misc_feature (4)..(4): 2'-O-methyl Adenosine
  misc_feature (5)..(5): 2'-deoxy-2'-fluoro
  misc_feature (6)..(6): 2'-O-methyl Guanosine
  misc_feature (7)..(7): 2'-O-methyl Adenosine
  misc_feature (8)..(9): 2'-deoxy-2'-fluoro
  misc_feature (10)..(11): 2'-O-methyl Adenosine
  misc_feature (12)..(12): 2'-O-methyl Guanosine
  misc_feature (13)..(14): 2'-O-methyl Adenosine
  misc_feature (15)..(17): 2'-deoxy-2'-fluoro
  misc_feature (18)..(18): 2'-O-methyl Adenosine
  misc_feature (19)..(19): 2'-deoxy-2'-fluoro
  misc_feature (20)..(21): phosphorothioate linkage
aagacgaucaagaauccactt

SEQ ID NO: 9151 - DNA, 21 bp, Artificial Sequence
  synthetic
  misc_feature (1)..(1): 2'-O-methyl Adenosine
  misc_feature (2)..(4): 2'-deoxy-2'-fluoro
  misc_feature (5)..(5): 2'-O-methyl Guanosine
  misc_feature (6)..(12): 2'-O-methyl Adenosine
  misc_feature (13)..(13): 2'-O-methyl Guanosine
  misc_feature (14)..(14): 2'-O-methyl Adenosine
  misc_feature (15)..(15): 2'-deoxy-2'-fluoro
  misc_feature (16)..(16): 2'-O-methyl Guanosine
  misc_feature (17)..(17): 2'-O-methyl Adenosine
  misc_feature (18)..(19): 2'-deoxy-2'-fluoro
  misc_feature (20)..(21): phosphorothioate linkage
auuugaaaaaaagacgauctt

SEQ ID NO: 9152 - DNA, 21 bp, Artificial Sequence
  synthetic
  misc_feature (1)..(2): 2'-deoxy-2'-fluoro
  misc_feature (3)..(3): 2'-O-methyl Guanosine
  misc_feature (4)..(4): 2'-deoxy-2'-fluoro
  misc_feature (5)..(5): 2'-O-methyl Adenosine
  misc_feature (6)..(6): 2'-deoxy-2'-fluoro
  misc_feature (7)..(7): 2'-O-methyl Adenosine
  misc_feature (8)..(8): 2'-deoxy-2'-fluoro
  misc_feature (9)..(9): 2'-O-methyl Guanosine
  misc_feature (10)..(10): 2'-O-methyl Adenosine
  misc_feature (11)..(12): 2'-O-methyl Guanosine
  misc_feature (13)..(15): 2'-deoxy-2'-fluoro
  misc_feature (16)..(16): 2'-O-methyl Adenosine
  misc_feature (17)..(17): 2'-deoxy-2'-fluoro
  misc_feature (18)..(18): 2'-O-methyl Guanosine
  misc_feature (19)..(19): 2'-deoxy-2'-fluoro
  misc_feature (20)..(21): phosphorothioate linkage
uuguauaugaggcccaugctt

SEQ ID NO: 9153 - DNA, 21 bp, Artificial Sequence
  synthetic
  misc_feature (1)..(1): 5'-3 attached deoxy abasic moiety
  misc_feature (21)..(21): 3'-3 attached deoxy abasic moiety
gggugcagaugcaacgauutt

SEQ ID NO: 9154 - DNA, 21 bp, Artificial Sequence
  synthetic
  misc_feature (1)..(1): 5'-3 attached deoxy abasic moiety
  misc_feature (21)..(21): 3'-3 attached deoxy abasic moiety
cauggacaaagcaguuaaatt

SEQ ID NO: 9155 - DNA, 21 bp, Artificial Sequence
  synthetic
  misc_feature (1)..(1): 5'-3 attached deoxy abasic moiety
  misc_feature (21)..(21): 3'-3 attached deoxy abasic moiety
ggaagaauaucgaaaggaatt

SEQ ID NO: 9156 - DNA, 21 bp, Artificial Sequence
  synthetic
  misc_feature (1)..(1): 5'-3 attached deoxy abasic moiety
  misc_feature (21)..(21): 3'-3 attached deoxy abasic moiety
guggcaacaaccaauccautt

SEQ ID NO: 9157 - DNA, 21 bp, Artificial Sequence
  synthetic
  misc_feature (1)..(1): 5'-3 attached deoxy abasic moiety
  misc_feature (21)..(21): 3'-3 attached deoxy abasic moiety
gagacuugaagaugucuuutt

SEQ ID NO: 9158 - DNA, 21 bp, Artificial Sequence
  synthetic
  misc_feature (1)..(1): 5'-3 attached deoxy abasic moiety
  misc_feature (21)..(21): 3'-3 attached deoxy abasic moiety
guggauucuugaucgucuutt

SEQ ID NO: 9159 - DNA, 21 bp, Artificial Sequence
  synthetic
  misc_feature (1)..(1): 5'-3 attached deoxy abasic moiety
  misc_feature (21)..(21): 3'-3 attached deoxy abasic moiety
gaucgucuuuuuuucaaautt

SEQ ID NO: 9160 - DNA, 21 bp, Artificial Sequence
  synthetic
  misc_feature (1)..(1): 5'-3 attached deoxy abasic moiety
  misc_feature (21)..(21): 3'-3 attached deoxy abasic moiety
gcaugggccucauauacaatt

SEQ ID NO: 9161 - DNA, 21 bp, Artificial Sequence
  synthetic
  misc_feature (20)..(21): phosphorothioate linkage
aaucguugcaucugcaccctt

SEQ ID NO: 9162 - DNA, 21 bp, Artificial Sequence
  synthetic
  misc_feature (20)..(21): phosphorothioate linkage
uuuaacugcuuuguccaugtt

SEQ ID NO: 9163 - DNA, 21 bp, Artificial Sequence
  synthetic
  misc_feature (20)..(21): phosphorothioate linkage
uuccuuucgauauucuucctt

SEQ ID NO: 9164 - DNA, 21 bp, Artificial Sequence
  synthetic
  misc_feature (20)..(21): phosphorothioate linkage
auggauugguuguugccactt

SEQ ID NO: 9165 - DNA, 21 bp, Artificial Sequence
  synthetic
  misc_feature (20)..(21): phosphorothioate linkage
aaagacaucuucaagucuctt

SEQ ID NO: 9166 - DNA, 21 bp, Artificial Sequence
  synthetic
  misc_feature (20)..(21): phosphorothioate linkage
aagacgaucaagaauccactt

SEQ ID NO: 9167 - DNA, 21 bp, Artificial Sequence
  synthetic
  misc_feature (20)..(21): phosphorothioate linkage
auuugaaaaaaagacgauctt

SEQ ID NO: 9168 - DNA, 21 bp, Artificial Sequence
  synthetic
  misc_feature (20)..(21): phosphorothioate linkage
uuguauaugaggcccaugctt

SEQ ID NO: 9169 - DNA, 21 bp, Artificial Sequence
  synthetic
  misc_feature (1)..(2): 2'-O-methyl Adenosine
  misc_feature (3)..(4): 2'-deoxy-2'-fluoro
  misc_feature (5)..(5): 2'-O-methyl Guanosine
  misc_feature (6)..(7): 2'-deoxy-2'-fluoro
  misc_feature (8)..(8): 2'-O-methyl Guanosine
  misc_feature (9)..(9): 2'-deoxy-2'-fluoro
  misc_feature (10)..(10): 2'-O-methyl Adenosine
  misc_feature (11)..(13): 2'-deoxy-2'-fluoro
  misc_feature (14)..(14): 2'-O-methyl Guanosine
  misc_feature (15)..(15): 2'-deoxy-2'-fluoro
  misc_feature (16)..(16): 2'-O-methyl Adenosine
  misc_feature (17)..(19): 2'-deoxy-2'-fluoro
  misc_feature (21)..(21): 3'-3 attached deoxy abasic moiety
aaucguugcaucugcaccctt

SEQ ID NO: 9170 - DNA, 21 bp, Artificial Sequence
  synthetic
  misc_feature (1)..(3): 2'-deoxy-2'-fluoro
  misc_feature (4)..(5): 2'-O-methyl Adenosine
  misc_feature (6)..(7): 2'-deoxy-2'-fluoro
  misc_feature (8)..(8): 2'-O-methyl Guanosine
  misc_feature (9)..(12): 2'-deoxy-2'-fluoro
  misc_feature (13)..(13): 2'-O-methyl Guanosine
  misc_feature (14)..(16): 2'-deoxy-2'-fluoro
  misc_feature (17)..(17): 2'-O-methyl Adenosine
  misc_feature (18)..(18): 2'-deoxy-2'-fluoro
  misc_feature (19)..(19): 2'-O-methyl Guanosine
  misc_feature (21)..(21): 3'-3 attached deoxy abasic moiety
uuuaacugcuuuguccaugtt

SEQ ID NO: 9171 - DNA, 21 bp, Artificial Sequence
  synthetic
  misc_feature (1)..(8): 2'-deoxy-2'-fluoro
  misc_feature (9)..(9): 2'-O-methyl Guanosine
  misc_feature (10)..(10): 2'-O-methyl Adenosine
  misc_feature (11)..(11): 2'-deoxy-2'-fluoro
  misc_feature (12)..(12): 2'-O-methyl Adenosine
  misc_feature (13)..(19): 2'-deoxy-2'-fluoro
  misc_feature (21)..(21): 3'-3 attached deoxy abasic moiety
uuccuuucgauauucuucctt

SEQ ID NO: 9172 - DNA, 21 bp, Artificial Sequence
  synthetic
  misc_feature (1)..(1): 2'-O-methyl Adenosine
  misc_feature (2)..(2): 2'-deoxy-2'-fluoro
  misc_feature (3)..(4): 2'-O-methyl Guanosine
  misc_feature (5)..(5): 2'-O-methyl Adenosine
  misc_feature (6)..(7): 2'-deoxy-2'-fluoro
  misc_feature (8)..(9): 2'-O-methyl Guanosine
  misc_feature (10)..(11): 2'-deoxy-2'-fluoro
  misc_feature (12)..(12): 2'-O-methyl Guanosine
  misc_feature (13)..(14): 2'-deoxy-2'-fluoro
  misc_feature (15)..(15): 2'-O-methyl Guanosine
  misc_feature (16)..(17): 2'-deoxy-2'-fluoro
  misc_feature (18)..(18): 2'-O-methyl Adenosine
  misc_feature (19)..(19): 2'-deoxy-2'-fluoro
  misc_feature (21)..(21): 3'-3 attached deoxy abasic moiety
auggauugguuguugccactt

SEQ ID NO: 9173 - DNA, 21 bp, Artificial Sequence
  synthetic
  misc_feature (1)..(3): 2'-O-methyl Adenosine
  misc_feature (4)..(4): 2'-O-methyl Guanosine
  misc_feature (5)..(5): 2'-O-methyl Adenosine
  misc_feature (6)..(6): 2'-deoxy-2'-fluoro
  misc_feature (7)..(7): 2'-O-methyl Adenosine
  misc_feature (8)..(12): 2'-deoxy-2'-fluoro
  misc_feature (13)..(14): 2'-O-methyl Adenosine
  misc_feature (15)..(15): 2'-O-methyl Guanosine
  misc_feature (16)..(19): 2'-deoxy-2'-fluoro
  misc_feature (21)..(21): 3'-3 attached deoxy abasic moiety
aaagacaucuucaagucuctt

SEQ ID NO: 9174 - DNA, 21 bp, Artificial Sequence
  synthetic
  misc_feature (1)..(2): 2'-O-methyl Adenosine
  misc_feature (3)..(3): 2'-O-methyl Guanosine
  misc_feature (4)..(4): 2'-O-methyl Adenosine
  misc_feature (5)..(5): 2'-deoxy-2'-fluoro
  misc_feature (6)..(6): 2'-O-methyl Guanosine
  misc_feature (7)..(7): 2'-O-methyl Adenosine
  misc_feature (8)..(9): 2'-deoxy-2'-fluoro
  misc_feature (10)..(11): 2'-O-methyl Adenosine
  misc_feature (12)..(12): 2'-O-methyl Guanosine
  misc_feature (13)..(14): 2'-O-methyl Adenosine
  misc_feature (15)..(17): 2'-deoxy-2'-fluoro
  misc_feature (18)..(18): 2'-O-methyl Adenosine
  misc_feature (19)..(19): 2'-deoxy-2'-fluoro
  misc_feature (21)..(21): 3'-3 attached deoxy abasic moiety
aagacgaucaagaauccactt

SEQ ID NO: 9175 - DNA, 21 bp, Artificial Sequence
  synthetic
  misc_feature (1)..(1): 2'-O-methyl Adenosine
  misc_feature (2)..(4): 2'-deoxy-2'-fluoro
  misc_feature (5)..(5): 2'-O-methyl Guanosine
  misc_feature (6)..(12): 2'-O-methyl Adenosine
  misc_feature (13)..(13): 2'-O-methyl Guanosine
  misc_feature (14)..(14): 2'-O-methyl Adenosine
  misc_feature (15)..(15): 2'-deoxy-2'-fluoro
  misc_feature (16)..(16): 2'-O-methyl Guanosine
  misc_feature (17)..(17): 2'-O-methyl Adenosine
  misc_feature (18)..(19): 2'-deoxy-2'-fluoro
  misc_feature (21)..(21): 3'-3 attached deoxy abasic moiety
auuugaaaaaaagacgauctt

SEQ ID NO: 9176 - DNA, 21 bp, Artificial Sequence
  synthetic
  misc_feature (1)..(2): 2'-deoxy-2'-fluoro
  misc_feature (3)..(3): 2'-O-methyl Guanosine
  misc_feature (4)..(4): 2'-deoxy-2'-fluoro
  misc_feature (5)..(5): 2'-O-methyl Adenosine
  misc_feature (6)..(6): 2'-deoxy-2'-fluoro
  misc_feature (7)..(7): 2'-O-methyl Adenosine
  misc_feature (8)..(8): 2'-deoxy-2'-fluoro
  misc_feature (9)..(9): 2'-O-methyl Guanosine
  misc_feature (10)..(10): 2'-O-methyl Adenosine
  misc_feature (11)..(12): 2'-O-methyl Guanosine
  misc_feature (13)..(15): 2'-deoxy-2'-fluoro
  misc_feature (16)..(16): 2'-O-methyl Adenosine
  misc_feature (17)..(17): 2'-deoxy-2'-fluoro
  misc_feature (18)..(18): 2'-O-methyl Guanosine
  misc_feature (19)..(19): 2'-deoxy-2'-fluoro
  misc_feature (21)..(21): 3'-3 attached deoxy abasic moiety
uuguauaugaggcccaugctt

SEQ ID NO: 9177 - DNA, 21 bp, Artificial Sequence
  synthetic
  misc_feature (21)..(21): 3'-3 attached deoxy abasic moiety
aaucguugcaucugcaccctt

SEQ ID NO: 9178 - DNA, 21 bp, Artificial Sequence
  synthetic
  misc_feature (21)..(21): 3'-3 attached deoxy abasic moiety
uuuaacugcuuuguccaugtt

SEQ ID NO: 9179 - DNA, 21 bp, Artificial Sequence
  synthetic
  misc_feature (21)..(21): 3'-3 attached deoxy abasic moiety
uuccuuucgauauucuucctt

SEQ ID NO: 9180 - DNA, 21 bp, Artificial Sequence
  synthetic
  misc_feature (21)..(21): 3'-3 attached deoxy abasic moiety
auggauugguuguugccactt

SEQ ID NO: 9181 - DNA, 21 bp, Artificial Sequence
  synthetic
  misc_feature (21)..(21): 3'-3 attached deoxy abasic moiety
aaagacaucuucaagucuctt

SEQ ID NO: 9182 - DNA, 21 bp, Artificial Sequence
  synthetic
  misc_feature (21)..(21): 3'-3 attached deoxy abasic moiety
aagacgaucaagaauccactt

SEQ ID NO: 9183 - DNA, 21 bp, Artificial Sequence
  synthetic
  misc_feature (21)..(21): 3'-3 attached deoxy abasic moiety
auuugaaaaaaagacgauctt

SEQ ID NO: 9184 - DNA, 21 bp, Artificial Sequence
  synthetic
  misc_feature (21)..(21): 3'-3 attached deoxy abasic moiety
uuguauaugaggcccaugctt

SEQ ID NO: 9185 - DNA, 21 bp, Artificial Sequence
  synthetic
  misc_feature (4)..(4): 2'-deoxy-2'-fluoro
  misc_feature (5)..(5): 2'-O-methyl Guanosine
  misc_feature (6)..(7): 2'-deoxy-2'-fluoro
  misc_feature (8)..(8): 2'-O-methyl Guanosine
  misc_feature (9)..(9): 2'-deoxy-2'-fluoro
  misc_feature (10)..(10): 2'-O-methyl Adenosine
  misc_feature (11)..(13): 2'-deoxy-2'-fluoro
  misc_feature (14)..(14): 2'-O-methyl Guanosine
  misc_feature (15)..(15): 2'-deoxy-2'-fluoro
  misc_feature (16)..(16): 2'-O-methyl Adenosine
  misc_feature (17)..(19): 2'-deoxy-2'-fluoro
  misc_feature (20)..(21): phosphorothioate linkage
aaucguugcaucugcaccctt

SEQ ID NO: 9186 - DNA, 21 bp, Artificial Sequence
  synthetic
  misc_feature (4)..(5): 2'-O-methyl Adenosine
  misc_feature (6)..(7): 2'-deoxy-2'-fluoro
  misc_feature (8)..(8): 2'-O-methyl Guanosine
  misc_feature (9)..(12): 2'-deoxy-2'-fluoro
  misc_feature (13)..(13): 2'-O-methyl Guanosine
  misc_feature (14)..(16): 2'-deoxy-2'-fluoro
  misc_feature (17)..(17): 2'-O-methyl Adenosine
  misc_feature (18)..(18): 2'-deoxy-2'-fluoro
  misc_feature (19)..(19): 2'-O-methyl Guanosine
  misc_feature (20)..(21): phosphorothioate linkage
uuuaacugcuuuguccaugtt

SEQ ID NO: 9187 - DNA, 21 bp, Artificial Sequence
  synthetic
  misc_feature (4)..(8): 2'-deoxy-2'-fluoro
  misc_feature (9)..(9): 2'-O-methyl Guanosine
  misc_feature (10)..(10): 2'-O-methyl Adenosine
  misc_feature (11)..(11): 2'-deoxy-2'-fluoro
  misc_feature (12)..(12): 2'-O-methyl Adenosine
  misc_feature (13)..(19): 2'-deoxy-2'-fluoro
  misc_feature (20)..(21): phosphorothioate linkage
uuccuuucgauauucuucctt

SEQ ID NO: 9188 - DNA, 21 bp, Artificial Sequence
  synthetic
  misc_feature (3)..(4): 2'-O-methyl Guanosine
  misc_feature (5)..(5): 2'-O-methyl Adenosine
  misc_feature (6)..(7): 2'-deoxy-2'-fluoro
  misc_feature (8)..(9): 2'-O-methyl Guanosine
  misc_feature (10)..(11): 2'-deoxy-2'-fluoro
  misc_feature (12)..(12): 2'-O-methyl Guanosine
  misc_feature (13)..(14): 2'-deoxy-2'-fluoro
  misc_feature (15)..(15): 2'-O-methyl Guanosine
  misc_feature (16)..(17): 2'-deoxy-2'-fluoro
  misc_feature (18)..(18): 2'-O-methyl Adenosine
  misc_feature (19)..(19): 2'-deoxy-2'-fluoro
  misc_feature (20)..(21): phosphorothioate linkage
auggauugguuguugccactt

SEQ ID NO: 9189 - DNA, 21 bp, Artificial Sequence
  synthetic
  misc_feature (4)..(4): 2'-O-methyl Guanosine
  misc_feature (5)..(5): 2'-O-methyl Adenosine
  misc_feature (6)..(6): 2'-deoxy-2'-fluoro
  misc_feature (7)..(7): 2'-O-methyl Adenosine
  misc_feature (8)..(12): 2'-deoxy-2'-fluoro
  misc_feature (13)..(14): 2'-O-methyl Adenosine
  misc_feature (15)..(15): 2'-O-methyl Guanosine
  misc_feature (16)..(19): 2'-deoxy-2'-fluoro
  misc_feature (20)..(21): phosphorothioate linkage
aaagacaucuucaagucuctt

SEQ ID NO: 9190 - DNA, 21 bp, Artificial Sequence
  synthetic
  misc_feature (4)..(4): 2'-O-methyl Adenosine
  misc_feature (5)..(5): 2'-deoxy-2'-fluoro
  misc_feature (6)..(6): 2'-O-methyl Guanosine
  misc_feature (7)..(7): 2'-O-methyl Adenosine
  misc_feature (8)..(9): 2'-deoxy-2'-fluoro
  misc_feature (10)..(11): 2'-O-methyl Adenosine
  misc_feature (12)..(12): 2'-O-methyl Guanosine
  misc_feature (13)..(14): 2'-O-methyl Adenosine
  misc_feature (15)..(17): 2'-deoxy-2'-fluoro
  misc_feature (18)..(18): 2'-O-methyl Adenosine
  misc_feature (19)..(19): 2'-deoxy-2'-fluoro
  misc_feature (20)..(21): phosphorothioate linkage
aagacgaucaagaauccactt

SEQ ID NO: 9191 - DNA, 21 bp, Artificial Sequence
  synthetic
  misc_feature (4)..(4): 2'-deoxy-2'-fluoro
  misc_feature (5)..(5): 2'-O-methyl Guanosine
  misc_feature (6)..(12): 2'-O-methyl Adenosine
  misc_feature (13)..(13): 2'-O-methyl Guanosine
  misc_feature (14)..(14): 2'-O-methyl Adenosine
  misc_feature (15)..(15): 2'-deoxy-2'-fluoro
  misc_feature (16)..(16): 2'-O-methyl Guanosine
  misc_feature (17)..(17): 2'-O-methyl Adenosine
  misc_feature (18)..(19): 2'-deoxy-2'-fluoro
  misc_feature (20)..(21): phosphorothioate linkage
auuugaaaaaaagacgauctt

SEQ ID NO: 9192 - DNA, 21 bp, Artificial Sequence
  synthetic
uuguauaugaggcccaugctt

SEQ ID NO: 9193 - DNA, 21 bp, Artificial Sequence
  Description of Artificial Sequence:  synthetic
  misc_feature (1)..(1): 5'-3 attached terminal deoxyabasic moiety
  misc_feature (21)..(21): 3'-3 attached terminal deoxyabasic moiety
  misc_feature (1)..(19): n stands for any ribonucleotide
  misc_feature (20)..(21): n stands for any deoxyribonucleotide
nnnnnnnnnnnnnnnnnnnnn

SEQ ID NO: 9194 - DNA, 21 bp, Artificial Sequence
  Description of Artificial Sequence:  synthetic
  misc_feature (20)..(20): Phosphorothioate 3'-Internucleotide Linkage
  misc_feature (1)..(19): n stands for any ribonucleotide
  misc_feature (20)..(21): n stands for any deoxyribonucleotide
  misc_feature (21)..(21): 3'-3 attached terminal glyceryl moiety
nnnnnnnnnnnnnnnnnnnnn

SEQ ID NO: 9195 - RNA, 21 nt, Artificial Sequence
  Description of Artificial Sequence:  sythetic
  misc_feature (1)..(19): n can be a 2'-Fluoro or OCF3 pyrimidine or any 2'-O-methyl purine
  misc_feature (20)..(20): Phosphorothioate 3'-Internucleotide Linkage
  misc_feature (20)..(21): n stands for any nucleotide
nnnnnnnnnnnnnnnnnnnnn

SEQ ID NO: 9196 - RNA, 21 nt, Artificial Sequence
  Description of Artificial Sequence:  synthetic
  misc_feature (1)..(19): n can be a 2'-Fluoro or OCF3 pyrimidine or any 2'-O-methyl purine
  misc_feature (20)..(20): Phosphorothioate 3'-Internucleotide Linkage
  misc_feature (20)..(21): n stands for any nucleotide
  misc_feature (21)..(21): 3'-3 attached terminal glyceryl moiety
nnnnnnnnnnnnnnnnnnnnn

SEQ ID NO: 9197 - RNA, 21 nt, Artificial Sequence
  Description of Artificial Sequence:  synthetic
  misc_feature (1)..(19): n stands for any nucleotide wherein any pyrimidine is -OCF3 or 2'-Fluoro
  misc_feature (20)..(21): n stands for any nucleotide
  misc_feature (1)..(1): 5'-3 attached terminal deoxyabasic moiety
  misc_feature (21)..(21): 3'-3 attached terminal deoxyabasic moiety
nnnnnnnnnnnnnnnnnnnnn

SEQ ID NO: 9198 - RNA, 21 nt, Artificial Sequence
  Description of Artificial Sequence:  synthetic
  misc_feature (1)..(19): n stands for any nucleotide wherein any pyrimidine is 2'-Fluoro or -OCF3
  misc_feature (20)..(20): Phosphorothioate 3'-Internucleotide Linkage
  misc_feature (20)..(21): n stands for any nucleotide
  misc_feature (21)..(21): 3'-3 attached terminal glyceryl moiety
nnnnnnnnnnnnnnnnnnnnn

SEQ ID NO: 9199 - RNA, 21 nt, Artificial Sequence
  Description of Artificial Sequence:  synthetic
  misc_feature (1)..(19): n stands for any nucleotide wherein any pyrimidine 2'-Fluoro or -OCF3 and any purine is 2'-Deoxy
  misc_feature (20)..(21): n stands for any nucleotide
  misc_feature (1)..(1): 5'-3 attached terminal deoxyabasic moiety
  misc_feature (21)..(21): 3'-3 attached terminal deoxyabasic moiety
nnnnnnnnnnnnnnnnnnnnn

SEQ ID NO: 9200 - RNA, 21 nt, Artificial Sequence
  Description of Artificial Sequence:  synthetic
  misc_feature (1)..(19): n stands for any nucleotide wherein any pyrimidine is -OCF3 or 2'-Fluoro and any purine is 2-deoxy
  misc_feature (20)..(21): n stands for any nucleotide
  misc_feature (1)..(1): 5'-3 attached terminal deoxyabasic moiety
  misc_feature (21)..(21): 3'-3 attached terminal deoxyabasic moiety
nnnnnnnnnnnnnnnnnnnnn

SEQ ID NO: 9201 - DNA, 21 bp, Artificial Sequence
  Description of Artificial Sequence:  synthetic
  misc_feature (20)..(20): Phosphorothioate 3'-Internucleotide Linkage
  misc_feature (1)..(19): ribonucleotide
  misc_feature (1)..(1): 5'-3 attached abasic moiety
  misc_feature (21)..(21): 3'-3 attached abasic moiety
cgaguaucauugggaucuutt

SEQ ID NO: 9202 - DNA, 21 bp, Artificial Sequence
  Description of Artificial Sequence:  synthetic
  misc_feature (20)..(20): Phosphorothioate 3'-Internucleotide Linkage
  misc_feature (1)..(19): ribonucleotide
  misc_feature (21)..(21): 3'-3 attached terminal glyceryl moiety
aagaucccaaugauacucgtt

SEQ ID NO: 9203 - DNA, 21 bp, Artificial Sequence
  Description of Artificial Sequence:  synthetic
  misc_feature (20)..(20): Phosphorothioate 3'-Internucleotide Linkage
  misc_feature (1)..(19): pyrimidines are fluoro or -OCF3, Purines are 2-OMe
cgaguaucauugggaucuutt

SEQ ID NO: 9204 - DNA, 21 bp, Artificial Sequence
  Description of Artificial Sequence:  synthetic
  misc_feature (20)..(20): Phosphorothioate 3'-Internucleotide Linkage
  misc_feature (1)..(19): pyrimidines are fluoro or -OCF3, Purines are 2-OMe
  misc_feature (21)..(21): 3'-3 attached terminal glyceryl moiety
aagaucccaaugauacucgtt

SEQ ID NO: 9205 - DNA, 21 bp, Artificial Sequence
  Description of Artificial Sequence:  synthetic
  misc_feature (20)..(20): Phosphorothioate 3'-Internucleotide Linkage
  misc_feature (1)..(19): ribonucleotides where pyrimidines are fluoro or -OCF3
  misc_feature (21)..(21): 3'-3 attached abasic moiety
  misc_feature (1)..(1): 5'-3 attached abasic moiety
cgaguaucauugggaucuutt

SEQ ID NO: 9206 - DNA, 21 bp, Artificial Sequence
  Description of Artificial Sequence:  synthetic
  misc_feature (20)..(20): Phosphorothioate 3'-Internucleotide Linkage
  misc_feature (1)..(19): ribonucleotides where pyrimidines are 2'-F or -OCF3
  misc_feature (21)..(21): 3'-3 attached terminal glyceryl moiety
aagaucccaaugauacucgtt

SEQ ID NO: 9207 - DNA, 21 bp, Artificial Sequence
  Description of Artificial Sequence:  synthetic
  misc_feature (1)..(19): ribonucleotides where purines are deoxy and pyrimidines are 2'-F or -OCF3
  misc_feature (1)..(1): 5'-3 attached terminal abasic moiety
  misc_feature (21)..(21): 3'-3 attached terminal abasic moiety
cgaguaucauugggaucuutt

SEQ ID NO: 9208 - DNA, 21 bp, Artificial Sequence
  Description of Artificial Sequence:  synthetic
  misc_feature (20)..(20): Phosphorothioate 3'-Internucleotide Linkage
  misc_feature (1)..(19): ribonucleotides where purines are deoxy and pyrimidines are 2'-F or -OCF3
  misc_feature (21)..(21): 3'-3 attached terminal glyceryl moiety
aagaucccaaugauacucgtt

SEQ ID NO: 9209 - RNA, 14 nt, Artificial Sequence
  synthetic
auauaucuauuucg

SEQ ID NO: 9210 - RNA, 14 nt, Artificial Sequence
  synthetic
cgaaauaguauaua

SEQ ID NO: 9211 - RNA, 22 nt, Artificial Sequence
  synthetic
cgaaauaguauauacuauuucg

SEQ ID NO: 9212 - DNA, 24 bp, Artificial Sequence
  synthetic
  misc_feature (1)..(22): ribonucleotide
cgaaauaguauauacuauuucgtt
